(19) United States
(12) Patent Application Publication
(10) Pub. No.: US 2007/0020267 A1
(43) Pub. Date: Jan. 25, 2007

(54) Anti-VEGF antibodies

(75) Inventors: Germaine Fuh, Pacifica, CA (US); Hans-Peter Gerber, Bellevue, WA (US); Wei-Ching Liang, Foster City, CA (US); Frederic A. Fellouse, Toronto (CA); Sachdev S. Sidhu, San Francisco, CA (US); Christian Wiesmann, Brisbane, CA (US)

Correspondence Address: MERCHANT & GOULD PC, P.O. BOX 2903, MINNEAPOLIS, MN, 55402-0903, US

(73) Assignee: Genentech, Inc., South San Francisco, CA (US)

(21) Appl. No.: 11/414,742

(22) Filed: Apr. 27, 2006

Related U.S. Application Data
(63) Continuation of application No. PCT/US04/29332, filed on Sep. 8, 2004.
(63) Continuation-in-part of application No. 11/342,249, filed on Jan. 27, 2006.
(63) Continuation-in-part of application No. PCT/US04/24662, filed on Jul. 30, 2004.
(60) Provisional application No. 60/516,495, filed on Nov. 1, 2003.
(60) Provisional application No. 60/570,912, filed on May 12, 2004.
(60) Provisional application No. 60/571,239, filed on May 13, 2004.
(60) Provisional application No. 60/576,315, filed on Jun. 1, 2004.
(60) Provisional application No. 60/580,757, filed on Jun. 18, 2004.
(60) Provisional application No. 60/491,877, filed on Aug. 1, 2003.
(60) Provisional application No. 60/516,495, filed on Nov. 1, 2003.
(60) Provisional application No. 60/570,912, filed on May 12, 2004.
(60) Provisional application No. 60/571,239, filed on May 13, 2004.
(60) Provisional application No. 60/576,315, filed on Jun. 1, 2004.
(60) Provisional application No. 60/580,757, filed on Jun. 18, 2004.

(51) Int. Cl. A61K 39/395; C07K 16/22

(52) U.S. Cl. 424/145.1; 530/388.25

(57) ABSTRACT

Anti-VEGF antibodies and variants thereof, including those having high affinity for binding to VEGF, are disclosed. Also provided are methods of using phage display technology with naïve libraries to generate and select the anti-VEGF antibodies with desired binding and other biological activities. Further contemplated are uses of the antibodies in research, diagnostic and therapeutic applications.

### CROSS REFERENCE TO RELATED APPLICATIONS

[0001] This application is a continuation of International Application No. PCT/US2004/029332, filed on Sep. 8, 2004 which claims benefit from U.S. Provisional Application Nos. 60/516,495, filed Nov. 1, 2003; 60/570,912, filed May 12, 2004; 60/571,239, filed May 13, 2004; 60/576,315, filed Jun. 1, 2004; 60/580,757, filed Jul. 30, 2004; and U.S. application Ser. No. 11/342,249, filed Jan. 27, 2006, and International Application No. PCT/US2004/024662, filed Jul. 30, 2004, which claims benefit from U.S. Provisional Application Nos. 60/491,877, filed Aug. 1, 2003; 60/516,495, filed Nov. 1, 2003; 60/570,912, filed May 12, 2004; 60/571,239, filed May 13, 2004; 60/576,315, filed Jun. 1, 2004; and 60/580,757, filed Jun. 18, 2004, all of these applications are hereby incorporated by reference.

### REFERENCE TO A COMPUTER PROGRAM LISTING APPENDIX

[0002] Two copies of compact disc-recordable (cd-rs) is provided with this patent document. The cd-r is formatted in ibm-pc format and is compatible with the ms-windows operating system. Each cd-r includes the following with the noted creation date: substitute sequence listing (seq id nos: 1-928) (dated Jan. 27, 2006; size: 711 kilobytes).

[0003] The content of these files are incorporated by reference herein. The files on each cd-r are accessible using a text-based editor.

### FIELD OF THE INVENTION

[0004] This invention relates generally to anti-VEGF selected polypeptide sequences and antibodies with beneficial properties for research, therapeutic and diagnostic purposes.

### BACKGROUND OF THE INVENTION

Angiogenesis and VEGF

[0005] Angiogenesis is an important cellular event in which vascular endothelial cells proliferate, prune and reorganize to form new vessels from preexisting vascular network. There are compelling evidences that the development of a vascular supply is essential for normal and pathological proliferative processes (Folkman and Klagsbrun (1987) Science 235:442-447). Delivery of oxygen and nutrients, as well as the removal of catabolic products, represent rate-limiting steps in the majority of growth processes occurring in multicellular organisms. Thus, it has been generally assumed that the vascular compartment is necessary, albeit but not sufficient, not only for organ development and differentiation during embryogenesis, but also for wound healing and reproductive functions in the adult.

[0006] Angiogenesis is also implicated in the pathogenesis of a variety of disorders, including but not limited to, proliferative retinopathies, age-related macular degeneration, tumors, rheumatoid arthritis (RA), and psoriasis. Angiogenesis is a cascade of process consisting of 1) degradation of the extracellular matrix of a local venue after the release of protease, 2) proliferation of capillary endothelial cells, and 3) migration of capillary tubules toward the angiogenic stimulus. Ferrara et al. (1992) Endocrine Rev. 13:18-32.

[0007] In view of the remarkable physiological and pathological importance of angiogenesis, much work has been dedicated to the elucidation of the factors capable of regulating this process. It is suggested that the angiogenesis process is regulated by a balance between pro- and anti-angiogenic molecules, and is derailed in various diseases, especially cancer. Carmeliet and Jain (2000) Nature 407:249-257.

[0008] Vascular endothelial cell growth factor (VEGF), a potent mitogen for vascular endothelial cells, has been reported as a pivotal regulator of both normal and abnormal angiogenesis. Ferrara and Davis-Smyth (1997) Endocrine Rev. 18:4-25; Ferrara (1999) J. Mol. Med. 77:527-543. Compared to other growth factors that contribute to the processes of vascular formation, VEGF is unique in its high specificity for endothelial cells within the vascular system. Recent evidence indicates that VEGF is essential for embryonic vasculogenesis and angiogenesis. Carneliet et al. (1996) Nature 380:435-439; Ferrara et al. (1996) Nature 380:439-442. Furthermore, VEGF is required for the cyclical blood vessel proliferation in the female reproductive tract and for bone growth and cartilage formation. Ferrara et al. (1998) Nature Med. 4:336-340; Gerber et al. (1999) Nature Med. 5:623-628.

[0009] In addition to being an angiogenic factor in angiogenesis and vasculogenesis, VEGF, as a pleiotropic growth factor, exhibits multiple biological effects in other physiological processes, such as endothelial cell survival, vessel permeability and vasodilation, monocyte chemotaxis and calcium influx. Ferrara and Davis-Smyth (1997), supra. Moreover, recent studies have reported mitogenic effects of VEGF on a few non-endothelial cell types, such as retinal pigment epithelial cells, pancreatic duct cells and Schwann cells. Guerrin et al. (1995) J. Cell Physiol. 164:385-394; Oberg-Welsh et al. (1997) Mol. Cell. Endocrinol. 126:125-132; Sondell et al. (1999) J. Neurosci. 19:5731-5740.

[0010] Substantial evidence also implicates VEGF's critical role in the development of conditions or diseases that involve pathological angiogenesis. The VEGF mRNA is overexpressed by the majority of human tumors examined (Berkman et al. J Clin Invest 91:153-159 (1993); Brown et al. Human Pathol. 26:86-91 (1995); Brown et al. Cancer Res. 53:4727-4735 (1993); Mattern et al. Brit. J Cancer. 73:931-934 (1996); and Dvorak et al. Am J. Pathol. 146:1029-1039 (1995)). Also, the concentration of VEGF in eye fluids are highly correlated to the presence of active proliferation of blood vessels in patients with diabetic and other ischemia-related retinopathies (Aiello et al. N. Engl. J. Med. 331:1480-1487 (1994)). Furthermore, recent studies have demonstrated the localization of VEGF in choroidal neovascular membranes in patients affected by AMD (Lopez et al. Invest. Ophtalmo. Vis. Sci. 37:855-868 (1996)).

[0011] The recognition of VEGF as a primary regulator of angiogenesis in pathological conditions has led to numerous attempts to block VEGF activities. Inhibitory anti-VEGF receptor antibodies, soluble receptor constructs, antisense strategies, RNA aptamers against VEGF and low molecular weight VEGF receptor tyrosine kinase (RTK) inhibitors have all been proposed for use in interfering with VEGF signaling (Siemeister et al. Cancer Metastasis Rev. 17:241-248 (1998). Indeed, anti-VEGF neutralizing antibodies have been shown to suppress the growth of a variety of human tumor cell lines in nude mice (Kim et al. Nature 362:841-844 (1993); Warren et al. J. Clin. Invest. 95:1789-1797 (1995); Borgström et al. Cancer Res. 56:4032-4039 (1996); and Melnyk et al. Cancer Res. 56:921-924 (1996)) and also inhibit intraocular angiogenesis in models of ischemic retinal disorders (Adamis et al. Arch. Ophthalmol. 114:66-71 (1996)). Therefore, anti-VEGF monoclonal antibodies or other inhibitors of VEGF action are promising candidates for the treatment of solid tumors and various intraocular neovascular disorders. Although the VEGF molecule is upregulated in tumor cells, and its receptors are upregulated in tumor infiltrated vascular endothelial cells, the expression of VEGF and its receptors remain low in normal cells that are not associated with angiogenesis.

Therapeutic Antibodies

[0012] Monoclonal antibodies can be manufactured using recombinant DNA technology. Widespread use has been made of monoclonal antibodies, particularly those derived from rodents, however nonhuman antibodies are frequently antigenic in humans. The art has attempted to overcome this problem by constructing “chimeric” antibodies in which a nonhuman antigen-binding domain is coupled to a human constant domain (Cabilly et al., U.S. Pat. No. 4,816,567). The isotype of the human constant domain may be selected to tailor the chimeric antibody for participation in antibody-dependent cellular cytotoxicity (ADCC) and complement-dependent cytotoxicity. In a further effort to resolve the antigen binding functions of antibodies and to minimize the use of heterologous sequences in human antibodies, humanized antibodies have been generated for various antigens in which substantially less than an intact human variable domain has been substituted at regions by the corresponding sequence from a non-human species. For example, rodent (CDR) residues have been substituted for the corresponding segments of a human antibody. In practice, humanized antibodies are typically human antibodies in which some complementarity determining region (CDR) residues and possibly some framework region (FR) residues are substituted by residues from analogous sites in rodent antibodies. Jones et al., Nature 321:522-525 (1986); Riechmann et al., Nature 332:323-327 (1988); Verhoeyen et al., Science 239:1534-1536 (1988).

[0013] Several humanized anti-humanVEGF antibodies have been successfully generated, and have shown significant huVEGF-inhibitory activities both in vitro and in vivo. Presta et al. (1997) Cancer Research 57:4593-4599; Chen et al. (1999) J. Mol. Biol. 293:865-881. One specific humanized anti-VEGF antibody, the Avastin™ antibody, is currently used in several clinical trials for treating various solid tumors; and another high-affinity variant of the humanized anti-VEGF antibody is currently clinically tested for treating choroidal neovascularization related age macular degeneration (AMD).

[0014] Prior to administering a therapeutic antibody to human, preclinical studies in nonhuman mammals are generally desired to evaluate the efficacy and/or toxicity of the antibody. Ideally, the antibodies subject to these studies are capable of recognizing and reacting with high potency to a target antigen endogenous to the host animal such as mouse or nonhuman primate.

Phage Display

[0015] Phage display technology has provided a powerful tool for generating and selecting novel proteins that bind to a ligand, such as an antigen. Using the technique of phage display, large libraries of protein variants can be generated and rapidly sorted for those sequences that bind to a target antigen with high affinity. Nucleic acids encoding variant polypeptides are fused to a nucleic acid sequence encoding a viral coat protein, such as the gene III protein or the gene VIII protein. Monovalent phage display systems where the nucleic acid sequence encoding the protein or polypeptide is fused to a nucleic acid sequence encoding a portion of the gene III protein have been developed. (Bass, S., Proteins, 8:309 (1990); Lowman and Wells, Methods: A Companion to Methods in Enzymology, 3:205 (1991)). In a monovalent phage display system, the gene fusion is expressed at low levels and wild type gene III proteins are also expressed so that infectivity of the particles is retained. Methods of generating peptide libraries and screening those libraries have been disclosed in many patents (e.g., U.S. Pat. No. 5,723,286, U.S. Pat. No. 5,432,018, U.S. Pat. No. 5,580,717, U.S. Pat. No. 5,427,908 and U.S. Pat. No. 5,498,530).

[0016] The demonstration of expression of peptides on the surface of filamentous phage and the expression of functional antibody fragments in the periplasm of E. coli was important in the development of antibody phage display libraries. (Smith et al., Science (1985), 228:1315; Skerra and Pluckthun, Science (1988), 240:1038). Libraries of antibodies or antigen binding polypeptides have been prepared in a number of ways including by altering a single gene by inserting random DNA sequences or by cloning a family of related genes. Methods for displaying antibodies or antigen binding fragments using phage display have been described in U.S. Pat. Nos. 5,750,373, 5,733,743, 5,837,242, 5,969,108, 6,172,197, 5,580,717, and 5,658,727. The library is then screened for expression of antibodies or antigen binding proteins with desired characteristics.

[0017] Phage display technology has several advantages over conventional hybridoma and recombinant methods for preparing antibodies with the desired characteristics. This technology allows the development of large libraries of antibodies with diverse sequences in less time and without the use of animals. Preparation of hybridomas or preparation of humanized antibodies can easily require several months of preparation. In addition, since no immunization is required, phage antibody libraries can be generated for antigens which are toxic or have low antigenicity (Hogenboom, Immunotechniques (1988), 4:1-20). Phage antibody libraries can also be used to generate and identify novel therapeutic antibodies.

[0018] Phage display libraries have been used to generate human antibodies from immunized, non-immunized humans, germ line sequences, or naïve B cell Ig repertories (Barbas & Burton, Trends Biotech (1996), 14:230; Griffiths et al., EMBO J. (1994), 13:3245; Vaughan et al., Nat. Biotech. (1996), 14:309; Winter EP 0368 684 B1). Naïve, or nonimmune, antigen binding libraries have been generated using a variety of lymphoidal tissues. Some of these libraries are commercially available, such as those developed by Cambridge Antibody Technology and Morphosys (Vaughan et al. (1996) Nature Biotech 14:309; Knappik et al. (1999) J. Mol. Biol. 296:57). However, many of these libraries have limited diversity.

[0019] The ability to identify and isolate high affinity antibodies from a phage display library is important in isolating novel antibodies for therapeutic use. Isolation of high affinity antibodies from a library is dependent on the size of the library, the efficiency of production in bacterial cells and the diversity of the library. See, for e.g., Knappik et al., J. Mol. Biol. (1999), 296:57. The size of the library is decreased by inefficiency of production due to improper folding of the antibody or antigen binding protein and the presence of stop codons. Expression in bacterial cells can be inhibited if the antibody or antigen binding domain is not properly folded. Expression can be improved by mutating residues in turns at the surface of the variable/constant interface, or at selected CDR residues. (Deng et al., J. Biol. Chem. (1994), 269:9533, Ulrich et al., PNAS (1995), 92:11907-11911; Forsberg et al., J. Biol. Chem. (1997), 272:12430). The sequence of the framework region is a factor in providing for proper folding when antibody phage libraries are produced in bacterial cells.

[0020] Generating a diverse library of antibodies or antigen binding proteins is also important to isolation of high affinity antibodies. Libraries with diversification in limited CDRs have been generated using a variety of approaches. See, for e.g., Tomlinson, Nature Biotech. (2000), 18:989-994. CDR3 regions are of interest in part because they often are found to participate in antigen binding. CDR3 regions on the heavy chain vary greatly in size, sequence and structural conformation.

[0021] Others have also generated diversity by randomizing CDR regions of the variable heavy and light chains using all 20 amino acids at each position. It was thought that using all 20 amino acids would result in a large diversity of sequences of variant antibodies and increase the chance of identifying novel antibodies. (Barbas, PNAS 91:3809 (1994); Yelton, D E, J. Immunology, 155:1994 (1995); Jackson, J. R., J. Immunology, 154:3310 (1995) and Hawkins, R E, J. Mol. Biology, 226:889 (1992)).

[0022] There have also been attempts to create diversity by restricting the group of amino acid substitutions in some CDRs to reflect the amino acid distribution in naturally occurring antibodies. See, Garrard & Henner, Gene (1993), 128:103; Knappik et al., J. Mol. Biol. (1999), 296:57. However, these attempts have had varying success and have not been applied in a systematic and quantitative manner. Creating diversity in the CDR regions while minimizing the number of amino acid changes has been a challenge.

### SUMMARY OF THE INVENTION

[0023] The present invention provides novel antibodies and polypeptide sequences. The present invention also provides antibodies capable of binding to rodent VEGF and human VEGF with Kd values within 10 fold of each value and are capable of inhibiting the binding of VEGF to a VEGF receptor. According to one embodiment, the antibody is capable of binding to either one or both of a Gly88Ala (G88A) or a Gly88Ser (G88S) human VEGF mutant with a Kd value that is within 10 fold of the Kd value of unmutated human VEGF.

[0024] The present invention provides antibodies that are capable of binding to a human VEGF and a mouse VEGF with Kd values that are 10 nM or less at 25° C. and are capable of inhibiting the binding of VEGF to a VEGF receptor. According to another embodiment the Kd values are 2 nM or less. According to another embodiment, the Kd values are 0.1 nM or less. According to another embodiment, an antibody of this invention binds VEGF with a Kd of no more than about 1 nM, or no more than about 500 pM.

[0025] The present invention also provides antibodies that are capable of binding to a human VEGF and to either one or both G88A and G88S mutants of human VEGF with Kd values that are 10 nM or less and are capable of inhibiting the binding of VEGF to a VEGF receptor. In another embodiment, the antibodies bind to a human VEGF and to either one or both human VEGF G88A and G88S mutants with Kd values that are 10 nM or less.

[0026] According to another embodiment, an antibody of this invention has an on-rate (kₒₙ) for binding to human and/or mouse VEGF that is 1.0 or more (10 M⁻¹S⁻¹). According to another embodiment, the on-rate is 5.0 or more (10 M⁻¹S⁻¹). According to yet another embodiment, the on-rate is 10.0 or more (10 M⁻S⁻¹).

[0027] According to another embodiment, the antibodies of this invention contact less than 80% of the total surface area (angstrom²) of G88 of human VEGF. According to another embodiment, the antibodies of this invention contact less than 70% of the total surface area (angstrom²) of G88 of human VEGF. According to another embodiment, the antibodies of this invention contact less than 60% of the total surface area (angstrom²) of G88 of human VEGF. According to another embodiment, the antibodies of this invention contact less than 1% of the total surface area (angstrom²) of G88 of human VEGF. Such antibodies are generally capable of also binding mouse VEGF.

[0028] The VEGF receptor to be inhibited from binding to VEGF can be the VEGF receptor 1 (Fit-1), VEGF receptor 2 (Flt-1) or both receptors.

[0029] According to one embodiment, an antibody of this invention contacts the 20 s helix of VEGF. According to another embodiment, an antibody of this invention contacts the 80 s loop of VEGF. According to yet another embodiment, an antibody of this invention contacts the 20 s helix and the 80 s loop of human VEGF.

[0030] According to one embodiment, an antibody of this invention has relative affinity for or is capable of contacting any one of residues F17, M18, Q22, Y25, D63, L66, C104 and P106 of human VEGF. According to another embodiment, an antibody of this invention has relative affinity for or is capable of contacting F17, M18, Q22, Y25, D63, L66, C104 and P106 of human VEGF. According to another embodiment, an antibody of this invention has relative affinity for or is capable of contacting residues F17 and Y21 of human VEGF. According to another embodiment, an antibody of this invention has further relative affinity for or is capable of contacting Y25 of VEGF. According to another embodiment, an antibody of this invention has relative affinity for or is capable of contacting M18 and Q89 human VEGF. According to another embodiment, an antibody of this invention has relative affinity for or is capable of contacting M18, Y21 and Y25 of human VEGF. According to a preferred embodiment, an antibody of this invention has a combination of three or more of any one of the above-mentioned embodiments.

[0031] In a further embodiment, an antibody of this invention has a functional epitope described herein. According to one embodiment, the functional epitope of an antibody according to this invention includes residue F17 of human VEGF. According to another embodiment, the functional epitope of an antibody according to this invention includes residues F17 and I83 of human VEGF. According to a further embodiment, the functional epitope of includes residues F17, I83 and Q89 of human VEGF. According to one embodiment, the functional epitope of an antibody according to this invention includes residues F17 and M18 of human VEGF. In a further embodiment, the functional epitope includes residues F17, M18 and I89 of human VEGF. According to one embodiment, the functional epitope of an antibody according to this invention includes residues F17, Y21 and Y25 of human VEGF. According to a further embodiment, the functional epitope includes residues F17, Y21, Q22, Y25, D63 and I83 of human VEGF. According to an alternative embodiment, the functional epitope includes residues F17, Y21, Y25 and Q89 of human VEGF. According to a further embodiment, the functional epitope includes residues F17, M18, D19, Y21, Y25, Q89, I91, K101, E103, and C104 of human VEGF. According to yet another embodiment, the functional epitope includes residues 17, Y21, Q22, Y25, D63, I83 and Q89 of human VEGF. A functional epitope of an antibody according to this invention can include a combination of any of the residues selected from the group consisting of F17, M18, Y21, Q22, Y25, K48, D63, L66, M81, I83, H86, Q89, I91, C104 and P106 of human VEGF. According to another embodiment, the functional epitope includes residues F17, M18, Y21, Q22, Y25, K48, D63, L66, M81,I83, H86, Q89, I91, C104 and P106 of human VEGF.

[0032] According to one embodiment, an antibody of this invention comprises a CDR-H3 comprising the contiguous amino acid sequence X₁X₂FX₄X₅X₆X₇, wherein

[0033] X is Y or F;

[0034] X₂ is V or A;

[0035] X₄ is F or Y;

[0036] X₅ is L or A;

[0037] X₆ is P or A; and

[0038] X₇ is Y or F.

[0039] According to another embodiment, the antibody further comprises a CDR-H2 having a contiguous amino acid sequence GX₂TPX₅G (SEQ ID NO.1), wherein

[0040] X₂ is a I or V or other hydrophobic amino acid; and

[0041] X₅ is any amino acid residue.

[0042] According to yet another embodiment, the antibody still further comprises a CDR-H1 having a contigous amino acid sequence X₁X₂X_{3z}IH, wherein

[0043] X₁ is any amino acid residue;

[0044] X₂ is Y or F; and

[0045] X₃ is W or L.

[0046] According to one preferred embodiment, the antibody further comprises the CDR-L1, CDR-L2 and CDR-L3 of any one of the antibodies of FIG. 7. According to another embodiment, the CDR-L1 is located at approximately residues 28-33, the CDR-L2 is located at approximately residues 50-55; and the CDR-L3 is located at approximately residues 91-96. According to another embodiment, the CDR-H1 is located at approximately residues 30-33, the CDR-H2 is located at approximately residues 50-58; and the CDR-L3 is located at approximately residues 94-100a. According to one preferred embodiment, the antibody comprises the framework regions of the G6 antibody, the G6-23 antibody or the G6-31 antibody. According to another embodiment, the antibody comprises the light chain CDRs or the light chain variable region of the G6 antibody, the G6-23 antibody or the G6-31 antibody.

[0047] According to one embodiment, an antibody of this invention is an antibody comprising:

[0048] (a) a CDR-L1 comprising the contiguous amino acid sequence X₁X₂X₃X₄X₅L, wherein:

[0049] X₁ and X₂ are any amino acid;

[0050] Either X₃ or X₄ or both X₃ and X₄ are R;

[0051] X₅ is S or A; and

[0052] (b) a CDR-L2 comprising a contiguous amino acid sequence X₁X₂X₃, wherein

[0053] X₁ is S or A or G; and

[0054] X₂ and X₃ is any amino acid residue; and

[0055] (c) a CDR-L3 comprising a contigous amino acid sequence SX₁X₂X₃PL, wherein

[0056] X₁ and X₂ are any amino acid residue; and

[0057] X₃ is S or A.

[0058] According to one preferred embodiment, the antibody comprises the framework regions of the B20-4.1 antibody or the B20-4 antibody. According to another embodiment, the antibody comprises the CDRs or the variable region of the B20 heavy chain variable region. According to another embodiment, the X₁X₂X₃ of the CDR-L2 is encoded by X₁ASX₄LX₆, wherein X₄ and X₆ are any amino acid. According to another embodiment, the CDR-L1 is located at approximately residues 28-33, the CDR-L2 is located at approximately residues 50-55; and the CDR-L3 is located at approximately residues 91-96. According to another embodiment, the CDR-H1 is located at approximately residues 30-33, the CDR-H2 is located at approximately residues 50-58; and the CDR-L3 is located at approximately residues 94-100a.

[0059] Also contemplated is an antibody comprising a CDR-H3 sequence of any one of the antibodies of FIGS. 7, 24-29 and 34-43 and optionally further comprising a CDR-H2 and/or a CDR-H1 of the same antibody from FIGS. 7, 24-29 and 34-43. Also, contemplated is an antibody selected from the group consisting of a G6 series antibody, a B20 series antibody, YADS series antibody and a YS series antibody. Further, another antibody of this invention is an antibody comprising a variable region of any one of the antibodies of FIGS. 7, 24-29 and 34-43.

[0060] According to one preferred embodiment, the antibodies of this invention are synthesized by recombinant methods rather than produced directly from a hybridoma or derived from an antibody sequence from a hybridoma. In one preferred embodiment, the antibody binds to hVEGF with a Kd value of no more than about 2 nM, no more than about 1 nM, or no more than about 500 pM. According to one embodiment, antibody is a monoclonal antibody. According to another embodiment, the antibody is a multi-specific antibody (e.g., a bispecific antibody).

[0061] In a further embodiment of the invention, the high affinity anti-hVEGF antibody is also capable of binding to a VEGF from a non-human mammal species with Kd values comparible to, or at least within ten-fold of, the Kd value for its hVEGF binding. Such antibodies with cross-species high binding affinities are particularly useful for preclinical research as well as diagnostic and therapeutic applications. Some of the antibodies intended for therapeutic use were generated using a target human antigen as the immunogen. The resultant antibody may be “species-dependent”, i.e. while binding specifically to human antigen, it may be much less effective at binding a homologue of that antigen from a nonhuman mammal. This is found herein to be problematic, particularly where the nonhuman mammal is one in which preclinical studies of the antibody are to be carried out. An example is the anti-VEGF antibody, the Avastin™ antibody, used for treating cancers. While the Avastin™ antibody had a strong binding affinity for human VEGF (i.e. K_{d} 1.8 nM), the affinity for murine VEGF was unsuitable for conducting experiments in mouse models.

[0062] In one aspect, the antibodies are synthetic antibodies comprising at least one variant CDR in its variable domains, wherein the variant CDR comprises variant amino acid in at least one solvent accessible and highly diverse amino acid position, wherein the variant amino acid is encoded by a nonrandom codon set, and wherein at least 70% of the amino acids encoded by the nonrandom set are target amino acids for that position in known antibody variable domains. The antibody may have a heavy chain variable domain which comprises at least 1, 2 or 3 variant CDRs selected from the group consisting of CDR H1, H2 and H3. Preferably the heavy chain variable domain comprises a variant CDR H3. The antibody may also have a light chain variable domain which comprises at least 1, 2 or 3 variant CDRs selected from the group consisting of CDR L1, L2 and L3.

[0063] According to another embodiment, an antibody of this invention binds human VEGF and a rodent VEGF with a desired affinity but does not bind to any one or all of the VEGF-related homologues selected from the group consisting of human VEGF-B, human VEGF-D, and human PIGF-2.

[0064] According to one preferred embodiment, an antibody of this invention has a combination of three or more of any one of the above-mentioned embodiments. According to another embodiment, a Fab antibody of this invention is conjugated to an agent the will increase the half-life of the Fab antibody. According to one preferred embodiment, the agent is a polypeptide comprising the sequence DICLPRWGCLW. In a preferred embodiment, the antibodies of this invention do not bind to PIGF, VEGF-D or VEGF-B.

[0065] The invention also provide a method of selecting a hVEGF antibody from a library of synthetic antibodies comprising: a) generating the library of synthetic antibodies having a designed diversity in at least one of the CDRs; b) contacting the library with hVEGF to form binders; c) separating the binders from the nonbinders, and eluting the binders from the target hVEGF and incubating the binders in a solution with decreasing amounts of the target hVEGF in a concentration from about 0.1 nM to 1000 nM; and c) selecting the binders that can bind to the lowest concentration of the target VEGF and that have an affinity of about 500 pM to 2 nM.

[0066] Also contemplated are variants of the synthetic antibodies with improved binding affinities to hVEGF or to VEGF of non-human species, or both. Various forms of the antibody and variants thereof are contemplated herein. For example, the antibody mutant may be a full length antibody (e.g. having a human immunoglobulin constant region) or an antibody fragment (e.g. a Fab or F(ab′)₂). Furthermore, the antibody mutant may be labeled with a detectable label, immobilized on a solid phase and/or conjugated with a heterologous compound (such as a cytotoxic agent).

[0067] Diagnostic and therapeutic uses for the antibody are contemplated. In one diagnostic application, the invention provides a method for determining the presence of a protein of interest comprising exposing a sample suspected of containing the protein to the antibody mutant and determining binding of the antibody mutant to the sample. For this use, the invention provides a kit comprising the antibody mutant and instructions for using the antibody mutant to detect the protein.

[0068] The invention further provides: isolated nucleic acid encoding the antibody; a vector comprising the nucleic acid, optionally, operably linked to control sequences recognized by a host cell transformed with the vector; a host cell transformed with the vector; a process for producing the antibody comprising culturing this host cell so that the nucleic acid is expressed and, optionally, recovering the antibody mutant from the host cell culture (e.g. from the host cell culture medium).

[0069] The invention also provides a composition comprising the antibody and a pharmaceutically acceptable carrier or diluent. This composition for therapeutic use is sterile and may be lyophilized. Also contemplated is the use of an antibody or polypeptide of this invention in the manufacture of a medicament for treating an indication described herein. The composition can further comprise a second thereapeutic agent such as a chemotherapeutic agent, a cytotoxic agent or an anti-angiogenic agent.

[0070] The invention further provides a method for treating a mammal, comprising administering an effective amount of the antibody to the mammal. The mammal to be treated in the method may be a nonhuman mammal, e.g. a primate suitable for gathering preclinical data or a rodent (e.g., mouse or rat or rabbit). The nonhuman mammal may be healthy (e.g. in toxicology studies) or may be suffering from a disorder to be treated with the antibody of interest. In one embodiment, the mammal is suffering from or is at risk of developing abnormal angiogenesis (e.g., pathological angiogenesis). In one specific embodiment, the disorder is a cancer selected from the group consisting of colorectal cancer, renal cell carcinoma, ovarian cancer, lung cancer, non-small-cell lung cancer (NSCLC), bronchoalveolar carcinoma and pancreatic cancer. In another embodiment, the disorder is a disease caused by ocular neovascularisation, e.g., diabetic blindness, retinopathies, primarily diabetic retinopathy, age-induced macular degeneration and rubeosis. In another embodiment, the mammal to be treated is suffering from or is at risk of developing an edema (e.g., an edema associated with brain tumors, an edema associated with stroke, or a cerebral edema). In another embodiment, the mammal is suffering from or at risk of developing a disorder or illness selected from the group consisting of rheumatoid arthritis, inflammatory bowel disease, refractory ascites, psoriasis, sarcoidosis, arterial arteriosclerosis, sepsis, burns and pancreatitis. According to another embodiment, the mammal is suferring from or is at risk of developing a genitourinary illness selected from the group consisting of polycystic ovarian disease (POD), endometriosis and uterine fibroids. The amount of antibody administered will be a therapeutically effective amount to treat the disorder. In dose escalation studies, a variety of doses of the antibody may be administered to the mammal. In another embodiment, a therapeutically effective amount of the antibody is administered to a human patient to treat a disorder in that patient. In one preferred embodiment, antibodies of this invention useful for treating inflammatory or immune diseases described herein (e.g., rheumatoid arthritis) are Fab or scFv antibodies, especially Fab or scFv antibodies derived from the G6 series of antibodies or the B20 series of antibodies. Antibodies that do not cause aggregation of VEGF and do not aggregate themselves such as the B20 series of IgG antibodies are particularly useful in treating inflammatory and immune diseases. Accordingly, such antibodies are can be can be used in the manufacture of a medicament for treating an inflammatory or immune disease. A mammal that is suffering from or is at risk for developing a disorder or illness described herein can be treated by administering, a second therapeutic agent, simultaneously, sequentially or in combination with, an antibody of this invention. It should be understood that other therapeutic agents, in addition to the second therapeutic agent, can be administered to the mammal or used in the manufacture of a medicament for the desired indications.

[0071] These antibodies and polypeptides can be used to understand the role of host stromal cell collaboration in the growth of implanted non-host tumors, such as in mouse models wherein human tumors have been implanted. These antibodies and polypeptides can be used in methods of identifying human tumors that can escape anti-VEGF treatment by observing or monitoring the growth of the tumor implanted into a rodent or rabbit after treatment with an anti-VEGF antibodies of this invention. The antibodies and polypeptides of this invention can also be used to study and evaluate combination therapies with anti-VEGF antibodies of this invention and other therapeutic agents. The antibodies and polypeptides of this invention can be used to study the role of VEGF in other diseases by administering the antibodies or polypeptides to an animal suffering from the disease of a similar disease and determining whether one or more symptoms of the disease are alleviated.

### BRIEF DESCRIPTION OF THE DRAWINGS

[0072] FIG. 1 is a schematic illustration of various types of antibody fragments useful for phage display.

[0073] FIG. 2 compares residue changes within heavy chain CDRs of the template antibody h4D5 and the four selected novel synthetic antibodies. Also compared are VEGF bindings of the four antibodies.

[0074] FIG. 3 depicts the abilities of VEGF receptors (Flt1-d2 and KDR) to block VEGF bindings of the novel anti-VEGF antibodies. Y0959A, an anti-VEGF variant, was used as control.

[0075] FIG. 4 shows that the G6 antibody specifically binds to both hVEGF and mVEGF, but not to VEGF-related antigens.

[0076] FIG. 5 shows that G6 can effectively block both hVEGF and mVEGF binding to the KDR receptor. Fab-12 and Y0317 were used as controls.

[0077] FIG. 6 shows effects of G6 on VEGF-induced HUVEC proliferation.

[0078] FIG. 7 illustrates steps of generating high affinity anti-VEGF antibodies and the list of residues and binding affinities related to various affinity-improved G6 variants.

[0079] FIG. 8 compares VEGF bindings of G6, G6-23 and Fab-12. Association rates (on-rate) to both hVEGF and mVEGF were measured over time; the calculated Kon, Koff and Kd are listed.

[0080] FIG. 9 compares VEGF binding on-rates of G6 and further improved variants of G6-23.

[0081] FIG. 10 depicts effects of VEGF antagonists (G6-23 and Flt1-3Fc) on neonate mice body weights and survival rates.

[0082] FIG. 11 depicts effects of G6-23 on tumor growth in nude mice with xenografted human tumor cells (KM12 cells and SW480 cells), as measured by tumor volumes over number of treatment days.

[0083] FIG. 12 shows VEGF expressions (both hVEGF and mVEGF) in KM12 xenograft mice in the presence or absence of G6-23.

[0084] FIG. 13 depicts effects of VEGF antagonists (G6-23 and Flt1-3Fc) on tumor growth in nude mice with xenografted mouse tumor (LL2), as measured by tumor volumes over number of treatment days.

[0085] FIGS. 14A and B describe codons designed for shotgun scanning codons of G6 and G6-23. For each scan, degenerate shotgun codons for (A) heavy and (B) light chain were designed to encode the wild-type amino acid and alanine (m1) in alanine-scan or similar amino acid (m4) in homolog-scan for both G6 and G6-23 Fab. The shotgun codons are represented by the IUB code (K=G/T, M=A/C, R=A/G, S=G/C, V=A/C/G, W=A/T, Y=C/T). More substitutions (m2, m3, and m5) occurred in some residues due to the nature of the genetic code. In the case of wild-type alanine, the shotgun codon was designed to encode alanine and glycine. Each residue on CDRs is denoted by the single-letter code for amino acid, followed by a number denoting its position according to the scheme of Kabat et al., 1987. In positions where the sequences of G6 and G6-23 differ were shown in two letters, e.g. Q89K denotes position 89 which is Gln or Lys in G6 or G6-23, respectively. Asterisks(*) indicate both alanine- and homolog-scan codons encode a common substitution.

[0086] FIG. 15 provides information regarding the construction of G6 and G6-23 shotgun scanning libraries. The shotgun scanning libraries were performed to mutate codons for the indicated residues on the heavy (hc) or light (lc) chain of G6 and G6-23 with either alanine- or homolog-scan shotgun codons (FIGS. 14A and B). In total, eight libraries were constructed using the mutagenic oligonucleotides as shown in Example 1. The theoretical diversity of each library, total numbers of amino acid combinations encoded by the mutagenic oligonucleotides, was exceeded at least 100-fold by the actual diversity of the constructed library.

[0087] FIGS. 16A and B describe the results of the G6 and G6-23 heavy chain shotgun scan. The effect of each mutation (FIGS. 14A and B) on the heavy chain CDR residues of (A) G6 and (B) G6-23 was evaluated by calculating wt/mut ratios from sequences of functional clones, either from the alanine-scan libraries (m1, m2, and m3) or the homolog-scan libraries (m4 and m5), isolated after binding selection to either hVEGF (target selection) or an anti-gD tag antibody (display selection). To provide a quantitative estimate of the effect of each mutation on the binding affinity of G6 and G6-23 for hVEGF, the function ratio (Fwt/mut) at each mutation site was derived from dividing the wt/mut ratio from target selection by that from display selection. Deleterious effects are indicated by Fwt/mut values greater than 1.0, and mutations that result in significantly deleterious effects (Fwt/mut>10) are shown in bold text. Several mutations were not observed amongst the target selection and only a lower limit could be defined for its wt/mut ratio; therefore, the Fwt/mut value was indicated as a greater sign.

[0088] FIGS. 17A and B describe the results of the G6 and G6-23 light chain shotgun scan. The effect of each mutation (FIGS. 14A and B) on the light chain CDR residues of (A) G6 and (B) G6-23 was evaluated by calculating wt/mut ratios from sequences of functional clones, either from the alanine-scan libraries (m1, m2, and m3) or the homolog-scan libraries (m4 and m5), isolated after binding selection to either hVEGF (target selection) or an anti-gD tag antibody (display selection). To provide a quantitative estimate of the effect of each mutation on the binding affinity of G6 and G6-23 for hVEGF, the function ratio (Fwt/mut) at each mutation site was derived from dividing the wt/mut ratio from target selection by that from display selection. Deleterious effects are indicated by Fwt/mut values greater than 1.0, and mutations that result in significantly deleterious effects (Fwt/mut>10) are shown in bold text.

[0089] FIG. 18 is a comparison of relative binding activities for FabG6 and G6-23 point mutants to hVEGF with function values (Fwt/mut) from shotgun scanning. The relative binding activities of each mutant protein to hVEGF were evaluated with IC50,mut/IC50,wt ratio, a measure of the fold reduction in hVEGF binding activity due to each point mutation. The IC50, wt values for G6 and G6-23 are 2.5 nM and 20 pM respectively. The ratio without showing the standard error is estimated the error is ±5%. The ratios of significantly deleterious mutations could not be precisely quantitated because no inhibition was observed at the highest concentratrion of hVEGF (1 uM and 0.1 uM for G6 and G6-23 respectively) used in the assay and were only shown as a lower limit (>400 and >5000 for G6 and G6-23 mutants respectively) for fold reduction in hVEGF binding. The function values (Fwt/mut) of shotgun scanning were from FIGS. 16 and 17. DDGmut-wt values for both mutagenesis scanning were calculated using the equation as indicated in the legend of FIGS. 22A and B.

[0090] FIG. 19 describes the relative binding affinities for as measured by phage ELISAs for phage-derived Hvegf₁₋₁₀₉ single alanine mutant to bind different versions of anti-hVEGF antibodies or hVEGF receptors (G6, G6-23, and B20-4 Fabs, monoclonal antibody A4.6.1 and receptors Flt-1 (1-3), Flt-1D2 and KDR-Ig, respectively). The effects of phage-derived single alanine mutants of hVEGF on the binding affinity of anti-hVEGF antibody and hVEGF receptor were assessed as the relative IC50 values, which are calculated as IC_{50, ala}/ID_{50,wt} from phage ELISAs. A number greater than 1.0 indicated reduction in binding affinity and any variant with significant relative IC50 values greater than 10 was highlighted as bold text. The IC5_{0,wt} values for G6 and G6-23 are 2.5 nM and 20 pM respectively. The ratio without showing the standard error is estimated that the average error is +/−5%. Because phage ELISAs required substantial binding of the mutant phagemid to its protein target to generate a measurable signal, non-binders (NB) could not be precisely quantitated but may be interpreted to have a greatly reduced binding affinity (greater than 1000 IC50 value). Asterick (*) indicated the alanine scanning data on hVEGF for Fab-12 and hVEGF receptors were from Muller et al., (1997) PNAS USA 94: 7192-7197 and Li et al., (2000) Cancer Res. 57:4593-4599.

[0091] FIGS. 20A and B describe results from the FabG6 and G6-23 heavy chain shotgun scan. Fwt/mut values measured the effects of FabG6 and G6-23 heavy chain CDRs alanine (black bars) or homolog (white bars) substitutions on binding affinity for hVEGF. Shotgun scanning data for (A) FabG6 heavy chain were from FIG. 16A, and for (B) FabG6-23 heavy chain were from FIG. 16B.

[0092] FIGS. 21A and B describe results from the FabG6 and G6-23 light chain shotgun scan. Fwt/mut values measured the effects of FabG6 and G6-23 light chain CDRs alanine (black bars) or homolog (white bars) substitutions on binding affinity for hVEGF. Shotgun scanning data for (A) FabG6 light chain were from FIG. 17A, and for (B) FabG6-23 light chain were from FIG. 17B.

[0093] FIGS. 22A and B report the DDGAla-wt values for the FabG6 and G6-23 shotgun scan. DDGAla-wt values measuring the effects of (A) FabG6 and (B) FabG6-23 CDRs alanine substitutions on binding affinity for hVEGF were calculated using biophysical equation (DDGAla-wt=RTln(Ka,wt/Ka,Ala)=RTln(Fwt/Ala)) as previously described (Weiss et al., (2000) PNAS USA 97:8950-8954) and Fwt/Ala values were from FIGS. 16 and 17.

[0094] FIG. 23 describes the results of sensograms for injection of 100 nM Fab at 25° C. over hVEGF immobilized on BIAcore chip. It demonstrated the on-rate improvement for G6 variant with alanine substitution at position 58 of CDR-H2. Additional on-rate improvement also can be observed for this variant with valine substitution at position 51 of CDR-H2. This figure was generated using GraphPad Prism 4.0 version software (http://www.graphpad.com).

[0095] FIG. 24 shows the amino acid sequences of the G6 Fab light chain and the G6 Fab heavy chain, respectively. The underlines indicates residues in the CDR1-LC, CDR2-LC and CDR3-LC or CDR1-HC, CDR2-HC or CDR3-HC according to the Kabat numbering system.

[0096] FIG. 25 shows the amino acid sequence of the G6-23 Fab light chain and of the G6-23 Fab heavy chain as well as the amino acid sequences of the G6-31 and G6-8 Fab light chains. The underlines indicate the position of the CDRs according to the Kabat numbering system.

[0097] FIG. 26 shows the amino acid sequences the amino acid sequences of the G6-23.1 and G6-23.2 Fab light and heavy chains. The underlines indicate the position of the CDRs according to the Kabat numbering system.

[0098] FIG. 27 shows the amino acid sequence of the B20 Fab light and heavy chains. The underlines indicate the position of the CDRs according to the Kabat numbering system.

[0099] FIG. 28 shows a summary of high affinity binders of VEGF derived from a B20-based library.

[0100] FIG. 29 shows the amino acid sequence of the B20-4 and B20-4.1 Fab light and heavy chains.

[0101] FIG. 30 shows the affinity improvement of the anti-mVEGF Fab G6 by light chain randomization. (A) the sensograms for injection of 500 nM Fab at 37° C. over mVEGF immobilized BIAcore chip demonstrate the off rate and on rate improvements; (B) the observed rate (K_{obs}, s⁻¹) of complex formation between G6 and variant Fabs and mVEGF as the rate of the decrease of fluorescence intensity was plotted against the concentrations of mVEGF (nM) used and the slope based on the pseudo-first-order analysis was the on rate (×10⁹ M⁻¹ s⁻¹).

[0102] FIG. 31 shows that G6 can effectively block both hVEGF and mVEGF binding to Flt-1 receptor. Fab-12 and Y0317 were used as controls.

[0103] FIG. 32 shows on-rates, off-rates, Kd values and IC50 values for Fab protein-human VEGF or Fab protein-mouse VEGF interactions at 25° C. and 37° C. using surface plasmon resonance (SPR) methods with BIAcore or solution binding assays with competition ELISA or fluorescence quenching with Fab-12 and Y0317 as comparison. “NB” indicates non-binder. “ND” indicates not determined.

[0104] FIG. 33A-E shows the inhibition of HM7 tumor growth in nude mice after administration with the G6 antibody, the G6-31 antibody, the Y0317 antibody and the Avastin™ antibody at (A) 0.1 mg/kg dose twice weekly, (B) 0.25 mg/kg dose twice weekly; (C) 0.5 mg/kg dose twice weekly; (D) 2 mg/kg twice weeklyand (E) 5 mg/kg dose twice weekly. An anti-ragweed antibody was used as a control.

[0105] FIG. 34 shows a summary of various G6 (A) light chain and (B) heavy chain variants based on sequence and IC50 analysis. The wild type IC50 reflects the mean of the values obtained in the different experiments. Varied amino acid positions are shown in bold. Residues differing from wild type G6 are highlighed. The residues are denoted by the single-letter amino acid code and a number denoting its position according to the scheme of Kabat et al., 1987

[0106] FIG. 35 shows a summary of various G6-23 (A) light chain and (B) heavy chain variants based on sequence and IC50 analysis. The wild type IC50 reflects the mean of the values obtained in the different experiments. Varied amino acid positions are shown in bold. Residues differing from wild type G6 are highlighed. The residues are denoted by the single-letter amino acid code and a number denoting its position according to the scheme of Kabat et al., 1987

[0107] FIG. 36 shows portions of the amino acid sequences of YADS-1, YADS-2 and YADS-3 antibodies and other clones. Represented are sequences of three hVEGF binders selected from the YADS-II library. Residues that were not randomized in the library are grey shaded.

[0108] FIG. 37 shows amino acid sequences of a group of YADS series antibodies. Represented are sequences of unique clones obtained from the sorting of library YADS-A against hVEGF. Residues that were not randomized in the library are grey shaded.

[0109] FIG. 38 shows amino acid sequences of a group of YADS series antibodies. Represented are sequences of unique clones obtained from the sorting of library YADS-B against hVEGF. Residues that were not randomized in the library are grey shaded.

[0110] FIG. 39 shows the Fab sequences of YADS2 and YADS3 antibodies. Bolded portions indicate variable region residies. Underlined portions indicate approximate residues of CDR-L1, CDR-L2, CDR-L3, CDR-H1, CDR-H2 or CDR-H3.

[0111] FIG. 40 shows NNK variants of the YADS2 antibody. “x” indicates a STOP codon or an unreadable sequence.

[0112] FIG. 41 shows amino acid sequences of a group of YS series antibodies. They represent sequences of binders obtained from selection of library YS-A and YS-B.

[0113] FIG. 42 shows CDR sequences from anti-VEGF antibodies of the YS libraries. Clones 1-52 were selected from library B, while clones 53-63 were selected from library A. From top to bottom, columns 1-5 of CDR-L3 refer to positions 91, 92, 93, 94 and 96, respectively; columns 1-5 of CDR-H1 refer to positions 28, 30, 31, 32, and 33; columns 1-6 of CDR-H2 refer to positions 50, 52, 53, 54, 56 and 58; and columns 1-15 of CDR-H3 refer to positions 95, 96, 97, 98, 99, 100 and 100a-i according to Kabat numbering.

[0114] FIG. 43 shows the sequence of the YS1 Fab. Portions in bold indicate residues in the variable region.

[0115] FIG. 44 shows that the growth of HUVEC cells induced by VEGF is inhibited by YADS2 Fab.

### DETAILED DESCRIPTION OF THE PREFERRED EMBODIMENTS

I. Definitions

[0116] The term “antibody” is used in the broadest sense and specifically covers monoclonal antibodies (including full length monoclonal antibodies), polyclonal antibodies, multispecific antibodies (e.g., bispecific antibodies), and antibody fragments so long as they exhibit the desired biological activity. A “G6 series polypeptide” according to this invention is a polypeptide, including an antibody according to this invention, that is derived from a sequence of a G6 antibody or G6-derived antibody according to any one of FIGS. 7, 24-26 and 34-35 and binds to human VEGF with a desired affinity according to this invention (e.g., 10 nm or less, 2 nM or less, 1 nM or less, 0.1 nM or less, 500 pM or less for the Fab version of the antibody at 25° C.). A “B20 series polypeptide” according to this invention is a polypeptide, including an antibody according to this invention, that is derived from a sequence of the B20 antibody or a B20-derived antibody according to any one of FIGS. 27-29 and binds to VEGF with a desired affinity according to this invention. A “YADS series polypeptide” or “YADS polypeptide” according to this invention is a polypeptide, including an antibody according to this invention, that is derived from a sequence of the YADS antibody according to any one of FIGS. 36-40 and binds to VEGF with a desired affinity according to this invention. A “YADS-2 series polypeptide” or “YADS2 polypeptide” according to this invention is a polypeptide, including an antibody according to this invention, that is derived from a sequence of the YADS2 antibody according to FIG. 36 or FIG. 39 and binds to VEGF with a desired affinity according to this invention. A “YADS-3 series polypeptide” or “YADS3 polypeptide” according to this invention is a polypeptide, including an antibody according to this invention, that is derived from a sequence of the YADS3 antibody according to FIG. 36 or FIG. 39 and binds to VEGF with a desired affinity according to this invention. “YS series polypeptide” or “YS polypeptide” according to this invention is a polypeptide, including an antibody according to this invention, that is derived from a sequence of a YS antibody according to FIG. 41-43 and binds to VEGF with a desired affinity according to this invention. According to one preferred embodiment, the G series polypeptide, B20 series polypeptide, the YADS series polypeptide, the YADS2 series polypeptide, the YADS3 series polypeptide or the YS series polypeptide binds to human and a non-human mammalian VEGF with a Kd value that is within 10 fold of each other. According to one embodiment, the kD values for those antibodies binding to human VEGF and a mouse VEGF are 10 nM or less. In another embodiment, the antibodies bind to human VEGF and mouse VEGF with Kd values of 2 nM or less. In another embodiment, the antibodies bind to human VEGF with Kd values of 1 nM or less. The affinities of such G6 series, B20 series, YADS and YS series polypeptides for VEGF can be improved by methods, e.g., such as the phage display techniques taught herein.

[0117] As used herein, “antibody variable domain” refers to the portions of the light and heavy chains of antibody molecules that include amino acid sequences of Complementarity Determining Regions (CDRs; ie., CDR1, CDR2, and CDR3), and Framework Regions (FRs). V_{H} refers to the variable domain of the heavy chain. V_{L} refers to the variable domain of the light chain. According to the methods used in this invention, the amino acid positions assigned to CDRs and FRs may be defined according to Kabat (Sequences of Proteins of Immunological Interest (National Institutes of Health, Bethesda, Md., 1987 and 1991)). Amino acid numbering of antibodies or antigen binding fragments is also according to that of Kabat.

[0118] As used herein, the term “Complementarity Determining Regions (CDRs; ie., CDR1, CDR2, and CDR3) refers to the amino acid residues of an antibody variable domain the presence of which are necessary for antigen binding. Each variable domain typically has three CDR regions identified as CDR1, CDR2 and CDR3. Each complementarity determining region may comprise amino acid residues from a “complementarity determining region” as defined by Kabat (i.e. about residues 24-34 (L1), 50-56 (L2) and 89-97 (L3) in the light chain variable domain and 31-35 (H1), 50-65 (H2) and 95-102 (H3) in the heavy chain variable domain; Kabat et al., Sequences of Proteins of Immunological Interest, 5th Ed. Public Health Service, National Institutes of Health, Bethesda, Md. (1991)) and/or those residues from a “hypervariable loop” (i.e. about residues 26-32 (L1), 50-52 (L2) and 91-96 (L3) in the light chain variable domain and 26-32 (H1), 53-55 (H2) and 96-101 (H3) in the heavy chain variable domain; Chothia and Lesk J. Mol. Biol. 196:901-917 (1987)). In some instances, a complementarity determining region can include amino acids from both a CDR region defined according to Kabat and a hypervariable loop. For example, the CDRH1 of the heavy chain of antibody 4D5 includes amino acids 26 to 35.

[0119] “Framework regions” (hereinafter FR) are those variable domain residues other than the CDR residues. Each variable domain typically has four FRs identified as FR1, FR2, FR3 and FR4. If the CDRs are defined according to Kabat, the light chain FR residues are positioned at about residues 1-23 (LCFR1), 35-49 (LCFR2), 57-88 (LCFR3), and 98-107 (LCFR4) and the heavy chain FR residues are positioned about at residues 1-30 (HCFR1), 36-49 (HCFR2), 66-94 (HCFR3), and 103-113 (HCFR4) in the heavy chain residues. If the CDRs comprise amino acid residues from hypervariable loops, the light chain FR residues are positioned about at residues 1-25 (LCFR1), 33-49 (LCFR2), 53-90 (LCFR3), and 97-107 (LCFR4) in the light chain and the heavy chain FR residues are positioned about at residues 1-25 (HCFR1), 33-52 (HCFR2), 56-95 (HCFR3), and 102-113 (HCFR4) in the heavy chain residues. In some instances, when the CDR comprises amino acids from both a CDR as defined by Kabat and those of a hypervariable loop, the FR residues will be adjusted accordingly. For example, when CDRH1 includes amino acids H26-H35, the heavy chain FR1 residues are at positions 1-25 and the FR2 residues are at positions 36-49.

[0120] As used herein, “codon set” refers to a set of different nucleotide triplet sequences used to encode desired variant amino acids. A set of oligonucleotides can be synthesized, for example, by solid phase synthesis, including sequences that represent all possible combinations of nucleotide triplets provided by the codon set and that will encode the desired group of amino acids. A standard form of codon designation is that of the IUB code, which is known in the art and described herein. A codon set typically is represented by 3 capital letters in italics, eg. NNK, NNS, XYZ, DVK and the like. A “non-random codon set”, as used herein, thus refers to a codon set that encodes select amino acids that fulfill partially, preferably completely, the criteria for amino acid selection as described herein. Synthesis of oligonucleotides with selected nucleotide “degeneracy” at certain positions is well known in that art, for example the TRIM approach (Knappek et al.; J. Mol. Biol. (1999), 296:57-86); Garrard & Henner, Gene (1993), 128:103). Such sets of oligonucleotides having certain codon sets can be synthesized using commercial nucleic acid synthesizers (available from, for example, Applied Biosystems, Foster City, Calif.), or can be obtained commercially (for example, from Life Technologies, Rockville, Md.). Therefore, a set of oligonucleotides synthesized having a particular codon set will typically include a plurality of oligonucleotides with different sequences, the differences established by the codon set within the overall sequence. Oligonucleotides, as used according to the invention, have sequences that allow for hybridization to a variable domain nucleic acid template and also can, but does not necessarily, include restriction enzyme sites useful for, for example, cloning purposes.

[0121] An “Fv” fragment is an antibody fragment which contains a complete antigen recognition and binding site. This region consists of a dimer of one heavy and one light chain variable domain in tight association, which can be covalent in nature, for example in scFv. It is in this configuration that the three CDRs of each variable domain interact to define an antigen binding site on the surface of the V_{H}-V_{L} dimer. Collectively, the six CDRs or a subset thereof confer antigen binding specificity to the antibody. However, even a single variable domain (or half of an Fv comprising only three CDRs specific for an antigen) has the ability to recognize and bind antigen, although usually at a lower affinity than the entire binding site.

[0122] The “Fab” fragment contains a variable and constant domain of the light chain and a variable domain and the first constant domain (CH1) of the heavy chain. F(ab′)₂ antibody fragments comprise a pair of Fab fragments which are generally covalently linked near their carboxy termini by hinge cysteines between them. Other chemical couplings of antibody fragments are also known in the art.

[0123] “Single-chain Fv” or “scFv” antibody fragments comprise the V_{H} and V_{L} domains of antibody, wherein these domains are present in a single polypeptide chain. Generally the Fv polypeptide further comprises a polypeptide linker between the V_{H} and V_{L} domains, which enables the scFv to form the desired structure for antigen binding. For a review of scFv, see Pluckthun in The Pharmacology of Monoclonal Antibodies, Vol 113, Rosenburg and Moore eds. Springer-Verlag, New York, pp. 269-315 (1994).

[0124] The term “diabodies” refers to small antibody fragments with two antigen-binding sites, which fragments comprise a heavy chain variable domain (V_{H}) connected to a light chain variable domain (V_{L}) in the same polypeptide chain (V_{H} and V_{L}). By using a linker that is too short to allow pairing between the two domains on the same chain, the domains are forced to pair with the complementary domains of another chain and create two antigen-binding sites. Diabodies are described more fully in, for example, EP 404,097; WO 93/11161; and Hollinger et al., Proc. Natl. Acad. Sci. USA, 90:6444-6448 (1993).

[0125] The expression “linear antibodies” refers to the antibodies described in Zapata et al., Protein Eng., 8(10):1057-1062 (1995). Briefly, these antibodies comprise a pair of tandem Fd segments (V_{H}-C_{H}1-V_{H}-C_{H}1) which, together with complementary light chain polypeptides, form a pair of antigen binding regions. Linear antibodies can be bispecific or monospecific.

[0126] The term “monoclonal antibody” as used herein refers to an antibody obtained from a population of substantially homogeneous antibodies, i.e., the individual antibodies comprising the population are identical except for possible naturally occurring mutations that may be present in minor amounts. Monoclonal antibodies are highly specific, being directed against a single antigenic site. Furthermore, in contrast to conventional (polyclonal) antibody preparations which typically include different antibodies directed against different determinants (epitopes), each monoclonal antibody is directed against a single determinant on the antigen. The modifier “monoclonal” indicates the character of the antibody as being obtained from a substantially homogeneous population of antibodies, and is not to be construed as requiring production of the antibody by any particular method. For example, the monoclonal antibodies to be used in accordance with the present invention may be made by the hybridoma method first described by Kohler et al., Nature 256:495 (1975), or may be made by recombinant DNA methods (see, e.g., U.S. Pat. No. 4,816,567). The “monoclonal antibodies” may also be isolated from phage antibody libraries using the techniques described in Clackson et al., Nature 352:624-628 (1991) and Marks et al., J. Mol. Biol. 222:581-597 (1991), for example.

[0127] The monoclonal antibodies herein specifically include “chimeric” antibodies (immunoglobulins) in which a portion of the heavy and/or light chain is identical with or homologous to corresponding sequences in antibodies derived from a particular species or belonging to a particular antibody class or subclass, while the remainder of the chain(s) is identical with or homologous to corresponding sequences in antibodies derived from another species or belonging to another antibody class or subclass, as well as fragments of such antibodies, so long as they exhibit the desired biological activity (U.S. Pat. No. 4,816,567; and Morrison et al., Proc. Natl. Acad. Sci. USA 81:6851-6855 (1984)).

[0128] “Humanized” forms of non-human (e.g., murine) antibodies are chimeric antibodies which contain minimal sequence derived from non-human immunoglobulin. For the most part, humanized antibodies are human immunoglobulins (recipient antibody) in which residues from a hypervariable region of the recipient are replaced by residues from a hypervariable region of a non-human species (donor antibody) such as mouse, rat, rabbit or nonhuman primate having the desired specificity, affinity, and capacity. In some instances, Fv framework region (FR) residues of the human immunoglobulin are replaced by corresponding non-human residues. Furthermore, humanized antibodies may comprise residues which are not found in the recipient antibody or in the donor antibody. These modifications are made to further refine antibody performance. In general, the humanized antibody will comprise substantially all of at least one, and typically two, variable domains, in which all or substantially all of the hypervariable loops correspond to those of a non-human immunoglobulin and all or substantially all of the FR regions are those of a human immunoglobulin sequence. The humanized antibody optionally also will comprise at least a portion of an immunoglobulin constant region (Fc), typically that of a human immunoglobulin. For further details, see Jones et al., Nature 321:522-525 (1986); Riechmann et al., Nature 332:323-329 (1988); and Presta, Curr. Op. Struct. Biol. 2:593-596 (1992).

[0129] A “species-dependent antibody” is one which has a stronger binding affinity for an antigen from a first mammalian species than it has for a homologue of that antigen from a second mammalian species. Normally, the species-dependent antibody “binds specifically” to a human antigen (i.e. has a binding affinity (K_{d}) value of no more than about 1×10⁻⁷ M, preferably no more than about 1×10⁻⁸ M and most preferably no more than about 1×10⁻⁹ M) but has a binding affinity for a homologue of the antigen from a second nonhuman mammalian species which is at least about 50 fold, or at least about 500 fold, or at least about 1000 fold, weaker than its binding affinity for the human antigen. The species-dependent antibody can be any of the various types of antibodies as defined above, but preferably is a humanized or human antibody.

[0130] As used herein, “antibody mutant” or “antibody variant” refers to an amino acid sequence variant of the species-dependent antibody wherein one or more of the amino acid residues of the species-dependent antibody have been modified. Such mutants necessarily have less than 100% sequence identity or similarity with the species-dependent antibody. In a preferred embodiment, the antibody mutant will have an amino acid sequence having at least 75% amino acid sequence identity or similarity with the amino acid sequence of either the heavy or light chain variable domain of the species-dependent antibody, more preferably at least 80%, more preferably at least 85%, more preferably at least 90%, and most preferably at least 95%. Identity or similarity with respect to this sequence is defined herein as the percentage of amino acid residues in the candidate sequence that are identical (i.e same residue) or similar (i.e. amino acid residue from the same group based on common side-chain properties, see below) with the species-dependent antibody residues, after aligning the sequences and introducing gaps, if necessary, to achieve the maximum percent sequence identity. None of N-terminal, C-terminal, or internal extensions, deletions, or insertions into the antibody sequence outside of the variable domain shall be construed as affecting sequence identity or similarity.

[0131] To increase the half-life of the antibodies or polypeptide containing the amino acid sequences of this invention, one can attach a salvage receptor binding epitope to the antibody (especially an antibody fragment), as described, e.g., in U.S. Pat. No. 5,739,277. For example, a nucleic acid molecule encoding the salvage receptor binding epitope can be linked in frame to a nucleic acid encoding a polypeptide sequence of this invention so that the fusion protein expressed by the engineered nucleic acid molecule comprises the salvage receptor binding epitope and a polypeptide sequence of this invention. As used herein, the term “salvage receptor binding epitope” refers to an epitope of the Fc region of an IgG molecule (e.g., IgG₁, IgG₂, IgG₃, or IgG₄) that is responsible for increasing the in vivo serum half-life of the IgG molecule (e.g., Ghetie, V et al., (2000) Ann. Rev. Immunol. 18:739-766, Table 1). Antibodies with substitutions in an Fc region thereof and increased serum half-lives are also described in WO00/42072 (Presta, L.), WO 02/060919; Shields, R. L., et al., (2001) JBC 276(9):6591-6604; Hinton, P. R., (2004) JBC 279(8):6213-6216). In another embodiment, the serum half-life can also be increased, for example, by attaching other polypeptide sequences. For example, antibodies of this invention or other polypeptide containing the amino acid sequences of this invention can be attached to serum albumin or a portion of serum albumin that binds to the FcRn receptor or a serum albumin binding peptide so that serum albumin binds to the antibody or polypeptide, e.g., such polypeptide sequences are disclosed in WO01/45746. In one preferred embodiment, the serum albumin peptide to be attached comprises an amino acid sequence of DICLPRWGCLW. In another embodiment, the half-life of a Fab according to this invention is increased by these methods. See also, Dennis, M. S., et al., (2002) JBC 277(38):35035-35043 for serum albumin binding peptide sequences.

[0132] An “isolated” antibody is one which has been identified and separated and/or recovered from a component of its natural environment. Contaminant components of its natural environment are materials which would interfere with diagnostic or therapeutic uses for the antibody, and may include enzymes, hormones, and other proteinaceous or nonproteinaceous solutes. In preferred embodiments, the antibody will be purified (1) to greater than 95% by weight of antibody as determined by the Lowry method, and most preferably more than 99% by weight, (2) to a degree sufficient to obtain at least 15 residues of N-terminal or internal amino acid sequence by use of a spinning cup sequenator, or (3) to homogeneity by SDS-PAGE under reducing or nonreducing conditions using Coomassie blue or, preferably, silver stain. Isolated antibody includes the antibody in situ within recombinant cells since at least one component of the antibody's natural environment will not be present. Ordinarily, however, isolated antibody will be prepared by at least one purification step.

[0133] An “angiogenic factor or agent” is a growth factor which stimulates the development of blood vessels, e.g., promote angiogenesis, endothelial cell growth, stabiliy of blood vessels, and/or vasculogenesis, etc. For example, angiogenic factors, include, but are not limited to, e.g., VEGF and members of the VEGF family, PIGF, PDGF family, fibroblast growth factor family (FGFs), TIE ligands (Angiopoietins), ephrins, Del-1, fibroblast growth factors: acidic (aFGF) and basic (bFGF), Follistatin, Granulocyte colony-stimulating factor (G-CSF), Hepatocyte growth factor (HGF)/scatter factor (SF), Interleukin-8 (IL-8), Leptin, Midkine, Placental growth factor, Platelet-derived endothelial cell growth factor (PD-ECGF), Platelet-derived growth factor, especially PDGF-BB or PDGFR-beta, Pleiotrophin (PTN), Progranulin, Proliferin, Transforming growth factor-alpha (TGF-alpha), Transforming growth factor-beta (TGF-beta), Tumor necrosis factor-alpha (TNF-alpha), Vascular endothelial growth factor (VEGF)/vascular permeability factor (VPF), etc. It would also include factors that accelerate wound healing, such as growth hormone, insulin-like growth factor-I (IGF-I), VIGF, epidermal growth factor (EGF), CTGF and members of its family, and TGF-alpha and TGF-beta. See, e.g., Klagsbrun and D'Amore, Annu. Rev. Physiol., 53:217-39 (1991); Streit and Detmar, Oncogene, 22:3172-3179 (2003); Ferrara & Alitalo, Nature Medicine 5(12):1359-1364 (1999); Tonini et al., Oncogene, 22:6549-6556 (2003) (e.g., Table 1 listing known angiogenic factors); and, Sato Int. J. Clin. Oncol., 8:200-206 (2003).

[0134] An “anti-angiogenesis agent” or “angiogenesis inhibitor” refers to a small molecular weight substance, an polynucleotide, an polypeptide, an isolated protein, a recombinant protein, an antibody, or conjugates or fusion proteins thereof, that inhibits angiogenesis, vasculogenesis, or undesirable vascular permeability, either directly or indirectly. It should be understood that the anti-angiogenesis agent includes those agents that bind and block the angiogenic activity of the angiogenic factor or its receptor. For example, an anti-angiogenesis agent is an antibody or other antagonist to an angiogenic agent as defined above, e.g., antibodies to VEGF-A or to the VEGF-A receptor (e.g., KDR receptor or Flt-1 receptor), anti-PDGFR inhibitors such as Gleevec™ (Imatinib Mesylate). Anti-angiogensis agents also include native angiogenesis inhibitors, e.g., angiostatin, endostatin, etc. See, e.g., Klagsbrun and D'Amore, Annu. Rev. Physiol., 53:217-39 (1991); Streit and Detmar, Oncogene, 22:3172-3179 (2003) (e.g., Table 3 listing anti-angiogenic therapy in malignant melanoma); Ferrara & Alitalo, Nature Medicine 5(12):1359-1364 (1999); Tonini et al., Oncogene, 22:6549-6556 (2003) (e.g., Table 2 listing known antiangiogenic factors); and, Sato Int. J. Clin. Oncol., 8:200-206 (2003) (e.g., Table 1 lists anti-angiogenic agents used in clinical trials).

[0135] The “Kd” or “Kd value” according to this invention is in one preferred embodiment measured by a radiolabeled VEGF binding assay (RIA) performed with the Fab version of the antibody and a VEGF molecule as described by the following assay that measures solution binding affinity of Fabs for VEGF by equilibrating Fab with a minimal concentration of (¹²⁵I)-labeled VEGF(109) in the presence of a titration series of unlabeled VEGF, then capturing bound VEGF with an anti-Fab antibody-coated plate (Chen, et al., (1999) J. Mol Biol 293:865-881). To establish conditions for the assay, microtiter plates (Dynex) are coated overnight with 5 ug/ml of a capturing anti-Fab antibody (Cappel Labs) in 50 mM sodium carbonate (pH 9.6), and subsequently blocked with 2% (w/v) bovine serum albumin in PBS for two to five hours at room temperature (approximately 23° C.). In a non-adsorbant plate (Nunc #269620), 100 pM or 26 pM [¹²⁵I]VEGF(109) are mixed with serial dilutions of a Fab of interest, e.g., Fab-12 (Presta et al., (1997) Cancer Res. 57:4593-4599). The Fab of interest is then incubated overnight; however, the incubation may continue for 65 hours to insure that equilibrium is reached. Thereafter, the mixtures are transferred to the capture plate for incubation at room temperature for one hour. The solution is then removed and the plate washed eight times with 0.1% Tween-20 in PBS. When the plates had dried, 150 ul/well of scintillant (MicroScint-20; Packard) is added, and the plates are counted on a Topcount gamma counter (Packard) for ten minutes. Concentrations of each Fab that give less than or equal to 20% of maximal binding are chosen for use in competitive binding assays. According to another embodiment the Kd or Kd value is measured by using surface plasmon resonance assays using a BIAcore™-2000 or a BIAcore™-3000 (BIAcore, Inc., Piscataway, N.J.) at 25° C. with immobilized hVEGF (8-109) CM5 chips at ˜10 response units (RU). Briefly, carboxymethylated dextran biosensor chips (CM5, BLAcore Inc.) are activated with N-ethyl-N′-(3-dimethylaminopropyl)-carbodiimide hydrochloride (EDC) and N-hydroxysuccinimide (NHS) according to the supplier's instructions. Human VEGF is diluted with 10 mM sodium acetate, pH 4.8, into 5 ug/ml (˜0.2 uM) before injection at a flow rate of 5 ul/minute to achieve approximately 10 response units (RU) of coupled protein. Following the injection of human VEGF, 1 M ethanolamine is injected to block unreacted groups. For kinetics measurements, two-fold serial dilutions of Fab (0.78 nM to 500 nM) are injected in PBS with 0.05% Tween 20 (PBST) at 25° C. at a flow rate of approximately 25 ul/min. Association rates (kₒₙ) and dissociation rates (k_{off}) are calculated using a simple one-to-one Langmuir binding model (BIAcore Evaluation Software version 3.2) by simultaneous fitting the association and dissociation sensorgram. The equilibrium dissociation constant (Kd) was calculated as the ratio k_{off}/kₒₙ See, e.g., Chen, Y., et al., (1999) J. Mol Biol 293:865-881. If the on-rate exceeds 10⁶ M⁻¹S⁻ by the surface plasmon resonance assay above, then the on-rate is can be determined by using a fluorescent quenching technique that measures the increase or decrease in fluorescence emission intensity (excitation=295 nm; emission=340 nm, 16 nm band-pass) at 25° C. of a 20 nM anti-VEGF antibody (Fab form) in PBS, pH 7.2, in the presence of increasing concentrations of human VEGF short form (8-109) or mouse VEGF as measured in a spectrometer, such as a stop-flow equipped spectrophometer (Aviv Instruments) or a 8000-series SLM-Aminco spectrophotometer (ThermoSpectronic) with a stirred cuvette.

[0136] An “on-rate” or “rate of association” or “association rate” or “kₒₙ” according to this invention is preferably determined with same surface plasmon resonance technique described above using a BIAcore™-2000 or a BIAcore™-3000 (BIAcore, Inc., Piscataway, N.J.) at 25° C. with immobilized hVEGF (8-109) CM5 chips at ˜10 response units (RU). Briefly, carboxymethylated dextran biosensor chips (CM5, BIAcore Inc.) are activated with N-ethyl-N′-(3-dimethylaminopropyl)-carbodiimide hydrochloride (EDC) and N-hydroxysuccinimide (NHS) according to the supplier's instructions. Human VEGF is diluted with 10 mM sodium acetate, pH 4.8, into 5 ug/ml (˜0.2 uM) before injection at a flow rate of 5 ul/minute to achieve approximately 10 response units (RU) of coupled protein. Following the injection of IM ethanolamine to block unreacted groups. For kinetics measurements, two-fold serial dilutions of Fab (0.78 nM to 500 nM) are injected in PBS with 0.05% Tween 20 (PBST) at 25° C. at a flow rate of approximately 25 ul/min. Association rates (kₒₙ) and dissociation rates (k_{off}) are calculated using a simple one-to-one Langmuir binding model (BIAcore Evaluation Software version 3.2) by simultaneous fitting the association and dissociation sensorgram. The equilibrium dissociation constant (Kd) was calculated as the ratio k_{off}/kₒₙ. See, e.g., Chen, Y., et al., (1999) J. Mol Biol 293:865-881. However, if the on-rate exceeds 10⁶ M⁻¹S⁻¹ by the surface plasmon resonance assay above, then the on-rate is preferably determined by using a fluorescent quenching technique that measures the increase or decrease in fluorescence emission intensity (excitation=295 nm; emission=340 nm, 16 nm band-pass) at 25° C. of a 20 nM anti-VEGF antibody (Fab form) in PBS, pH 7.2, in the presence of increasing concentrations of human short form (8-109) or mouse VEGF as measured in a a spectrometer, such as a stop-flow equipped spectrophometer (Aviv Instruments) or a 8000-series SLM-Aminco spectrophotometer (ThermoSpectronic) with a stirred cuvette.

[0137] A “functional epitope” according to this invention refers to amino acid residues of an antigen that contribute energetically to the binding of an antibody. Mutation of any one of the energetically contributing residues of the antigen (for example, mutation of wild-type VEGF by alanine or homolog mutation) will disrupt the binding of the antibody such that the relative affinity ratio (IC50mutant VEGF/IC50wild-type VEGF) of the antibody will be greater than 5 (see Example 2). In a preferred embodiment, the relative affinity ratio is determined by a solution binding phage displaying ELISA. Briefly, 96-well Maxisorp immunoplates (NUNC) are coated overnight at 4° C. with an Fab form of the antibody to be tested at a concentration of 2 ug/ml in PBS, and blocked with PBS, 0.5% BSA, and 0.05% Tween20 (PBT) for 2 h at room temperature. Serial dilutions of phage displaying hVEGF alanine point mutants (residues 8-109 form) or wild type hVEGF (8-109) in PBT are first incubated on the Fab-coated plates for 15 min at room temperature, and the plates are washed with PBS, 0.05% Tween20 (PBST). The bound phage is detected with an anti-M13 monoclonal antibody horseradish peroxidase (Amersham Pharmacia) conjugate diluted 1:5000 in PBT, developed with 3,3′, 5,5′-tetramethylbenzidine (TMB, Kirkegaard & Perry Labs, Gaithersburg, Md.) substrate for approximately 5 min, quenched with 1.0 M H₃PO₄, and read spectrophotometrically at 450 nm. The ratio of IC50 values (IC50,ala/IC50,wt) represents the fold of reduction in binding affinity (the relative binding affinity).

[0138] For competitive binding assays, Maxisorb plates are coated and blocked as above, and serial threefold dilutions of unlabeled VEGF(109) are made in PBS/Tween buffer in a Nunc plate. [¹²⁵I]VEGF(109) is added, followed by addition of a fixed concentration of the Fab of interest. The final concentrations of the Fab of interest are 100 pM and 10 pM, respectively. After incubation (as above), bound VEGF is captured and quantified as described above. The binding data is analyzed using a computer program to perform Scatchard analysis (P. Munson et al., (1980) Anal. Biochem. (1980) 107:220-239) for determination of the dissociation binding constants, K_{d}.

[0139] As used herein, “library” refers to a plurality of antibody or antibody fragment sequences (for example, polypeptides of the invention), or the nucleic acids that encode these sequences, the sequences being different in the combination of variant amino acids that are introduced into these sequences according to the methods of the invention.

[0140] “Phage display” is a technique by which variant polypeptides are displayed as fusion proteins to at least a portion of coat protein on the surface of phage, e.g., filamentous phage, particles. A utility of phage display lies in the fact that large libraries of randomized protein variants can be rapidly and efficiently sorted for those sequences that bind to a target antigen with high affinity. Display of peptide and protein libraries on phage has been used for screening millions of polypeptides for ones with specific binding properties. Polyvalent phage display methods have been used for displaying small random peptides and small proteins through fusions to either gene III or gene VIII of filamentous phage. Wells and Lowman, Curr. Opin. Struct. Biol., 3:355-362 (1992), and references cited therein. In a monovalent phage display, a protein or peptide library is fused to a gene III or a portion thereof, and expressed at low levels in the presence of wild type gene III protein so that phage particles display one copy or none of the fusion proteins. Avidity effects are reduced relative to polyvalent phage so that sorting is on the basis of intrinsic ligand affinity, and phagemid vectors are used, which simplify DNA manipulations. Lowman and Wells, Methods: A companion to Methods in Enzymology, 3:205-0216 (1991).

[0141] A “phagemid” is a plasmid vector having a bacterial origin of replication, e.g., ColE1, and a copy of an intergenic region of a bacteriophage. The phagemid may be used on any known bacteriophage, including filamentous bacteriophage and lambdoid bacteriophage. The plasmid will also generally contain a selectable marker for antibiotic resistance. Segments of DNA cloned into these vectors can be propagated as plasmids. When cells harboring these vectors are provided with all genes necessary for the production of phage particles, the mode of replication of the plasmid changes to rolling circle replication to generate copies of one strand of the plasmid DNA and package phage particles. The phagemid may form infectious or non-infectious phage particles. This term includes phagemids which contain a phage coat protein gene or fragment thereof linked to a heterologous polypeptide gene as a gene fusion such that the heterologous polypeptide is displayed on the surface of the phage particle.

[0142] The term “phage vector” means a double stranded replicative form of a bacteriophage containing a heterologous gene and capable of replication. The phage vector has a phage origin of replication allowing phage replication and phage particle formation. The phage is preferably a filamentous bacteriophage, such as an M13, f₁, fd, Pf3 phage or a derivative thereof, or a lambdoid phage, such as lambda, 21, phi80, phi81, 82, 424, 434, etc., or a derivative thereof.

[0143] As used herein, “solvent accessible position” refers to a position of an amino acid residue in the variable regions of the heavy and light chains of a source antibody or antigen binding fragment that is determined, based on structure, ensemble of structures and/or modeled structure of the antibody or antigen binding fragment, as potentially available for solvent access and/or contact with a molecule, such as an antibody-specific antigen. These positions are typically found in the CDRs and on the exterior of the protein. The solvent accessible positions of an antibody or antigen binding fragment, as defined herein, can be determined using any of a number of algorithms known in the art. Preferably, solvent accessible positions are determined using coordinates from a 3-dimensional model of an antibody, preferably using a computer program such as the InsightII program (Accelrys, San Diego, Calif.). Solvent accessible positions can also be determined using algorithms known in the art (e.g., Lee and Richards, J. Mol. Biol. 55, 379 (1971) and Connolly, J. Appl. Cryst. 16, 548 (1983)). Determination of solvent accessible positions can be performed using software suitable for protein modeling and 3-dimensional structural information obtained from an antibody. Software that can be utilized for these purposes includes SYBYL Biopolymer Module software (Tripos Associates). Generally and preferably, where an algorithm (program) requires a user input size parameter, the “size” of a probe which is used in the calculation is set at about 1.4 Angstrom or smaller in radius. In addition, determination of solvent accessible regions and area methods using software for personal computers has been described by Pacios ((1994) “ARVOMOL/CONTOUR: molecular surface areas and volumes on Personal Computers.” Comput. Chem. 18(4): 377-386; and (1995). “Variations of Surface Areas and Volumes in Distinct Molecular Surfaces of Biomolecules.” J. Mol. Model. 1: 46-53.)

[0144] “Treatment” refers to both therapeutic treatment and prophylactic or preventative measures. Those in need of treatment include those already with the disorder as well as those in which the disorder is to be prevented.

[0145] A “disorder” is any condition that would benefit from treatment with the antibody. For example, mammals who suffer from or need prophylaxis against abnormal angiogenesis (excessive, inappropriate or uncontrolled angiogenesis) or vascular permeability. This includes chronic and acute disorders or diseases including those pathological conditions which predispose the mammal to the disorder in question. Non-limiting examples of disorders to be treated herein include malignant and benign tumors; non-leukemias and lymphoid malignancies; neuronal, glial, astrocytal, hypothalamic and other glandular, macrophagal, epithelial, stromal and blastocoelic disorders; and inflammatory, angiogenic and immunologic disorders.

[0146] The term abnormal angiogenesis occurs when new blood vessels either grow excessively, insufficiently or inappropriately (e.g., the location, timing or onset of the angiogenesis being undesired from a medical standpoint) in a diseased state or such that it causes a diseased state. Excessive, inappropriate or uncontrolled angiogenesis occurs when there is new blood vessel growth that contributes to the worsening of the diseased state or causes a diseased state, such as in cancer, especially vascularized solid tumors and metastatic tumors (including colon, lung cancer (especially small-cell lung cancer), or prostate cancer), diseases caused by ocular neovascularisation, especially diabetic blindness, retinopathies, primarily diabetic retinopathy or age-induced macular degeneration and rubeosis; psoriasis, psoriatic arthritis, haemangioblastoma such as haemangioma; inflammatory renal diseases, such as glomerulonephritis, especially mesangioproliferative glomerulonephritis, haemolytic uremic syndrome, diabetic nephropathy or hypertensive nephrosclerosis; various imflammatory diseases, such as arthritis, especially rheumatoid arthritis, inflammatory bowel disease, psorsasis, sarcoidosis, arterial arteriosclerosis and diseases occurring after transplants, endometriosis or chronic asthma and more than 70 other conditions. The new blood vessels can feed the diseased tissues, destroy normal tissues, and in the case of cancer, the new vessels can allow tumor cells to escape into the circulation and lodge in other organs (tumor metastases). Insufficient angiogenesis occurs when there is inadequate blood vessels growth that contributes to the worsening of a diseased state, e.g., in diseases such as coronary artery disease, stroke, and delayed wound healing. Further, ulcers, strokes, and heart attacks can result from the absence of angiogenesis that normally required for natural healing. The present invention contemplates treating those patients that are at risk of developing the above-mentioned illnesses.

[0147] Other patients that are candidates for receiving the antibodies or polypeptides of this invention have, or are at risk for developing, abnormal proliferation of fibrovascular tissue, acne rosacea, acquired immune deficiency syndrome, artery occlusion, atopic keratitis, bacterial ulcers, Bechets disease, blood borne tumors, carotid obstructive disease, choroidal neovascularization, chronic inflammation, chronic retinal detachment, chronic uveitis, chronic vitritis, contact lens overwear, corneal graft rejection, corneal neovascularization, corneal graft neovascularization, Crohn's disease, Eales disease, epidemic keratoconjunctivitis, fungal ulcers, Herpes simplex infections, Herpes zoster infections, hyperviscosity syndromes, Kaposi's sarcoma, leukemia, lipid degeneration, Lyme's disease, marginal keratolysis, Mooren ulcer, Mycobacteria infections other than leprosy, myopia, ocular neovascular disease, optic pits, Osler-Weber syndrome (Osler-Weber-Rendu, osteoarthritis, Pagets disease, pars planitis, pemphigoid, phylectenulosis, polyarteritis, post-laser complications, protozoan infections, pseudoxanthoma elasticum, pterygium keratitis sicca, radial keratotomy, retinal neovascularization, retinopathy of prematurity, retrolental fibroplasias, sarcoid, scleritis, sickle cell anemia, Sogrens syndrome, solid tumors, Stargarts disease, Steven's Johnson disease, superior limbic keratitis, syphilis, systemic lupus, Terrien's marginal degeneration, toxoplasmosis, trauma, tumors of Ewing sarcoma, tumors of neuroblastoma, tumors of osteosarcoma, tumors of retinoblastoma, tumors of rhabdomyosarcoma, ulcerative colitis, vein occlusion, Vitamin A deficiency and Wegeners sarcoidosis, undesired angiogenesis associated with diabetes, parasitic diseases, abnormal wound healing, hypertrophy following surgery, injury or trauma, inhibition of hair growth, inhibition of ovulation and corpus luteum formation, inhibition of implantation and inhibition of embryo development in the uterus.

[0148] Anti-angiogenesis therapies are useful in the general treatment of graft rejection, lung inflammation, nephrotic syndrome, preeclampsia, pericardial effusion, such as that associated with pericarditis, and pleural effusion, diseases and disorders characterized by undesirable vascular permeability, e.g., edema associated with brain tumors, ascites associated with malignancies, Meigs' syndrome, lung inflammation, nephrotic syndrome, pericardial effusion, pleural effusion, permeability associated with cardiovascular diseases such as the condtion following myocardial infarctions and strokes and the like.

[0149] Other angiogenesis-dependent diseases according to this invention include angiofibroma (abnormal blood of vessels which are prone to bleeding), neovascular glaucoma (growth of blood vessels in the eye), arteriovenous malformations (abnormal communication between arteries and veins), nonunion fractures (fractures that will not heal), atherosclerotic plaques (hardening of the arteries), pyogenic granuloma (common skin lesion composed of blood vessels), scleroderma (a form of connective tissue disease), hemangioma (tumor composed of blood vessels), trachoma (leading cause of blindness in the third world), hemophilic joints, vascular adhesions and hypertrophic scars (abnormal scar formation).

[0150] The term “VEGF” or “VEGF” as used herein refers to the 165-amino acid human vascular endothelial cell growth factor and related 121-, 189-, and 206-amino acid human vascular endothelial cell growth factors, as described by Leung et al. Science, 246:1306 (1989), and Houck et al. Mol. Endocrin., 5:1806 (1991), together with the naturally occurring allelic and processed forms thereof. The term “VEGF” also refers to VEGFs from non-human species such as mouse, rat or primate. Sometimes the VEGF from a specific species are indicated by terms such as hVEGF for human VEGF, mVEGF for murine VEGF, and etc. The term “VEGF” is also used to refer to truncated forms of the polypeptide comprising amino acids 8 to 109 or 1 to 109 of the 165-amino acid human vascular endothelial cell growth factor. Reference to any such forms of VEGF may be identified in the present application, e.g., by “VEGF (8-109),” “VEGF (1-109)” or “VEGF₁₆₅.” The amino acid positions for a “truncated” native VEGF are numbered as indicated in the native VEGF sequence. For example, amino acid position 17 (methionine) in truncated native VEGF is also position 17 (methionine) in native VEGF. The truncated native VEGF has binding affinity for the KDR and Flt-1 receptors comparable to native VEGF.

[0151] The term “VEGF variant” as used herein refers to a VEGF polypeptide which includes one or more amino acid mutations in the native VEGF sequence. Optionally, the one or more amino acid mutations include amino acid substitution(s). For purposes of shorthand designation of VEGF variants described herein, it is noted that numbers refer to the amino acid residue position along the amino acid sequence of the putative native VEGF (provided in Leung et al., supra and Houck et al., supra.).

[0152] The terms “cancer” and “cancerous” refer to or describe the physiological condition in mammals that is typically characterized by unregulated cell growth. Examples of cancer include but are not limited to, carcinoma, lymphoma, blastoma, sarcoma, and leukemia. More particular examples of such cancers include squamous cell cancer, small-cell lung cancer, non-small cell lung cancer, gastrointestinal cancer, pancreatic cancer, glioblastoma, cervical cancer, ovarian cancer, liver cancer, bladder cancer, hepatoma, breast cancer, colon cancer, colorectal cancer, endometrial carcinoma, salivary gland carcinoma, kidney cancer, renal cancer, prostate cancer, vulval cancer, thyroid cancer, hepatic carcinoma and various types of head and neck cancer. “Mammal” for purposes of treatment refers to any animal classified as a mammal, including humans, domestic and farm animals, nonhuman primates, and zoo, sports, or pet animals, such as dogs, horses, cats, cows, etc.

[0153] The term “anti-neoplastic composition” refers to a composition useful in treating cancer comprising at least one active therapeutic agent, e.g., “anti-cancer agent.” Examples of therapeutic agents (anti-cancer agents) include, but are limited to, e.g., chemotherapeutic agents, growth inhibitory agents, cytotoxic agents, agents used in radiation therapy, anti-angiogenesis agents, apoptotic agents, anti-tubulin agents, and other-agents to treat cancer, such as anti-HER-2 antibodies, anti-CD20 antibodies, an epidermal growth factor receptor (EGFR) antagonist (e.g., a tyrosine kinase inhibitor), HER1/EGFR inhibitor (e.g., erlotinib (Tarceva™), platelet derived growth factor inhibitors (e.g., Gleevec™ (Imatinib Mesylate)), a COX-2 inhibitor (e.g., celecoxib), interferons, cytokines, antagonists (e.g., neutralizing antibodies) that bind to one or more of the following targets ErbB2, ErbB3, ErbB4, PDGFR-beta, BlyS, APRIL, BCMA or VEGF receptor(s), TRAIL/Apo2, and other bioactive and organic chemical agents, etc. Combinations thereof are also included in the invention.

[0154] The term “epitope tagged” when used herein refers to an antibody mutant fused to an “epitope tag”. The epitope tag polypeptide has enough residues to provide an epitope against which an antibody thereagainst can be made, yet is short enough such that it does not interfere with activity of the antibody mutant. The epitope tag preferably also is fairly unique so that the antibody thereagainst does not substantially cross-react with other epitopes. Suitable tag polypeptide generally have at least 6 amino acid residues and usually between about 8-50 amino acid residues (preferably between about 9-30 residues). Examples include the flu HA tag polypeptide and its antibody 12CA5 (Field et al. Mol. Cell. Biol. 8:2159-2165 (1988)); the c-myc tag and the 8F9, 3C7, 6E10, G4, B7 and 9E10 antibodies thereagainst (Evan et al., Mol. Cell. Biol. 5(12):3610-3616 (1985)); and the Herpes Simplex virus glycoprotein D (gD) tag and its antibody (Paborsky et al., Protein Engineering 3(6):547-553 (1990)). In certain embodiments, the epitope tag is a “salvage receptor binding epitope”.

[0155] The term “cytotoxic agent” as used herein refers to a substance that inhibits or prevents the function of cells and/or causes destruction of cells. The term is intended to include radioactive isotopes (e.g., I¹³¹, I¹²⁵, Y⁹⁰ and Re¹⁸⁶), chemotherapeutic agents, and toxins such as enzymatically active toxins of bacterial, fungal, plant or animal origin, or fragments thereof.

[0156] A “chemotherapeutic agent” is a chemical compound useful in the treatment of cancer. Examples of chemotherapeutic agents include is a chemical compound useful in the treatment of cancer. Examples of chemotherapeutic agents include alkylating agents such as thiotepa and CYTOXAN® cyclosphosphamide; alkyl sulfonates such as busulfan, improsulfan and piposulfan; aziridines such as benzodopa, carboquone, meturedopa, and uredopa; ethylenimines and methylamelamines including altretamine, triethylenemelamine, trietylenephosphoramide, triethiylenethiophosphoramide and trimethylolomelamine; acetogenins (especially bullatacin and bullatacinone); a camptothecin (including the synthetic analogue topotecan); bryostatin; callystatin; CC-1065 (including its adozelesin, carzelesin and bizelesin synthetic analogues); cryptophycins (particularly cryptophycin 1 and cryptophycin 8); dolastatin; duocarmycin (including the synthetic analogues, KW-2189 and CB1-TM1); eleutherobin; pancratistatin; a sarcodictyin; spongistatin; nitrogen mustards such as chlorambucil, chlomaphazine, cholophosphamide, estramustine, ifosfamide, mechlorethamine, mechlorethamine oxide hydrochloride, melphalan, novembichin, phenesterine, prednimustine, trofosfamide, uracil mustard; nitrosureas such as carmustine, chlorozotocin, fotemustine, lomustine, nimustine, and ranimnustine; antibiotics such as the enediyne antibiotics (e.g., calicheamicin, especially calicheamicin gamma1I and calicheamicin omegaI1 (see, e.g., Agnew, Chem Intl. Ed. Engl., 33: 183-186 (1994)); dynemicin, including dynemicin A; bisphosphonates, such as clodronate; an esperamicin; as well as neocarzinostatin chromophore and related chromoprotein enediyne antiobiotic chromophores), aclacinomysins, actinomycin, authramycin, azaserine, bleomycins, cactinomycin, carabicin, carminomycin, carzinophilin, chromomycinis, dactinomycin, daunorubicin, detorubicin, 6-diazo-5-oxo-L-norleucine, ADRIAMYCIN® doxorubicin (including morpholino-doxorubicin, cyanomorpholino-doxorubicin, 2-pyrrolino-doxorubicin and deoxydoxorubicin), epirubicin, esorubicin, idarubicin, marcellomycin, mitomycins such as mitomycin C, mycophenolic acid, nogalamycin, olivomycins, peplomycin, potfiromycin, puromycin, quelamycin, rodorubicin, streptonigrin, streptozocin, tubercidin, ubenimex, zinostatin, zorubicin; anti-metabolites such as methotrexate and 5-fluorouracil (5-FU); folic acid analogues such as denopterin, methotrexate, pteropterin, trimetrexate; purine analogs such as fludarabine, 6-mercaptopurine, thiamiprine, thioguanine; pyrimidine analogs such as ancitabine, azacitidine, 6-azauridine, carmofur, cytarabine, dideoxyuridine, doxifluridine, enocitabine, floxuridine; androgens such as calusterone, dromostanolone propionate, epitiostanol, mepitiostane, testolactone; anti-adrenals such as aminoglutethimide, mitotane, trilostane; folic acid replenisher such as frolinic acid; aceglatone; aldophosphamide glycoside; aminolevulinic acid; eniluracil; amsacrine; bestrabucil; bisantrene; edatraxate; defofamine; demecolcine; diaziquone; elfomithine; elliptinium acetate; an epothilone; etoglucid; gallium nitrate; hydroxyurea; lentinan; lonidainine; maytansinoids such as maytansine and ansamitocins; mitoguazone; mitoxantrone; mopidanmol; nitraerine; pentostatin; phenamet; pirarubicin; losoxantrone; podophyllinic acid; 2-ethylhydrazide; procarbazine; PSK® polysaccharide complex (JHS Natural Products, Eugene, Oreg.); razoxane; rhizoxin; sizofuran; spirogermanium; tenuazonic acid; triaziquone; 2,2′,2″-trichlorotriethylamine; trichothecenes (especially T-2 toxin, verracurin A, roridin A and anguidine); urethan; vindesine; dacarbazine; mannomustine; mitobronitol; mitolactol; pipobroman; gacytosine; arabinoside (“Ara-C”); cyclophosphamide; thiotepa; taxoids, e.g., TAXOLS paclitaxel (Bristol-Myers Squibb Oncology, Princeton, N.J.), ABRAXANE™ Cremophor-free, albumin-engineered nanoparticle formulation of paclitaxel (American Pharmaceutical Partners, Schaumberg, Ill.), and TAXOTERE® doxetaxel (Rhône-Poulenc Rorer, Antony, France); chloranbucil; GEMZAR® gemcitabine; 6-thioguanine; mercaptopurine; methotrexate; platinum analogs such as cisplatin and carboplatin; vinblastine; platinum; etoposide (VP-16); ifosfamide; mitoxantrone; vincristine; NAVELBINE® vinorelbine; novantrone; teniposide; edatrexate; daunomycin; aminopterin; xeloda; ibandronate; irinotecan (Camptosar, CPT-11) (including the treatment regimen of irinotecan with 5-FU and leucovorin); topoisomerase inhibitor RFS 2000; difluorometlhylomithine (DMFO); retinoids such as retinoic acid; capecitabine; combretastatin; leucovorin (LV); oxaliplatin, including the oxaliplatin treatment regimen (FOLFOX); inhibitors of PKC-alpha, Raf, H-Ras, EGFR (e.g., erlotinib (Tarceva™)) and VEGF-A that reduce cell proliferation and pharmaceutically acceptable salts, acids or derivatives of any of the above.

[0157] Also included in this definition are anti-hormonal agents that act to regulate or inhibit hormone action on tumors such as anti-estrogens and selective estrogen receptor modulators (SERMs), including, for example, tamoxifen (including NOLVADEXS tamoxifen), raloxifene, droloxifene, 4-hydroxytamoxifen, trioxifene, keoxifene, LY117018, onapristone, and FARESTON toremifene; aromatase inhibitors that inhibit the enzyme aromatase, which regulates estrogen production in the adrenal glands, such as, for example, 4(5)-imidazoles, aminoglutethimide, MEGASE® megestrol acetate, AROMASIN® exemestane, formestanie, fadrozole, RIVISOR® vorozole, FEMARA® letrozole, and ARIMIDEX® anastrozole; and anti-androgens such as flutamide, nilutamide, bicalutamide, leuprolide, and goserelin; as well as troxacitabine (a 1,3-dioxolane nucleoside cytosine analog); antisense oligonucleotides, particularly those which inhibit expression of genes in signaling pathways implicated in abherant cell proliferation, such as, for example, PKC-alpha, Raf and H-Ras; ribozymes such as a VEGF expression inhibitor (e.g., ANGIOZYME® ribozyme) and a HER2 expression inhibitor; vaccines such as gene therapy vaccines, for example, ALLOVECTIN® vaccine, LEUVECTIN® vaccine, and VAXID® vaccine; PROLEUKIN® rIL-2; LURTOTECAN® topoisomerase 1 inhibitor; ABARELIX® rmRH; Vinorelbine and Esperamicins (see U.S. Pat. No. 4,675,187), and pharmaceutically acceptable salts, acids or derivatives of any of the above.

[0158] The term “prodrug” as used in this application refers to a precursor or derivative form of a pharmaceutically active substance that is less cytotoxic to tumor cells compared to the parent drug and is capable of being enzymatically activated or converted into the more active parent form. See, e.g., Wilman, “Prodrugs in Cancer Chemotherapy” Biochemical Society Transactions, 14, pp. 375-382, 615th Meeting Belfast (1986) and Stella et al., “Prodrugs: A Chemical Approach to Targeted Drug Delivery,” Directed Drug Delivery, Borchardt et al., (ed.), pp. 247-267, Humana Press (1985). The prodrugs of this invention include, but are not limited to, phosphate-containing prodrugs, thiophosphate-containing prodrugs, sulfate-containing prodrugs, peptide-containing prodrugs, D-amino acid-modified prodrugs, glycosylated prodrugs, β-lactam-containing prodrugs, optionally substituted phenoxyacetamide-containing prodrugs or optionally substituted phenylacetamide-containing prodrugs, 5-fluorocytosine and other 5-fluorouridine prodrugs which can be converted into the more active cytotoxic free drug. Examples of cytotoxic drugs that can be derivatized into a prodrug form for use in this invention include, but are not limited to, those chemotherapeutic agents described above.

[0159] For the treatment of rheumatoid arthritis, the patient can be treated with an antibody of the invention in conjunction with any one or more of the following drugs: DMARDS (disease-modifying anti-rheumatic drugs (e.g., methotrexate), NSAI or NSAID (non-steroidal anti-inflammatory drugs), HUMIRA™ (adalimumab; Abbott Laboratories), ARAVA® (leflunomide), REMICADE® (infliximab; Centocor Inc., of Malvern, Pa.), ENBREL™ (etanercept; Immunex, Wash.), COX-2 inhibitors. DMARDs commonly used in RA are hydroxycloroquine, sulfasalazine, methotrexate, leflunomide, etanercept, infliximab, azathioprine, D-penicillamine, Gold (oral), Gold (intramuscular), minocycline, cyclosporine, Staphylococcal protein A immunoadsorption. Adalimumab is a human monoclonal antibody that binds to TNF. Infliximab is a chimeric monoclonal antibody that binds to TNF. Etanercept is an “immunoadhesin” fusion protein consisting of the extracellular ligand binding portion of the human 75 kD (p75) tumor necrosis factor receptor (TNFR) linked to the Fc portion of a human IgG1. For conventional treatment of RA, see, e.g., “Guidelines for the management of rheumatoid arthritis” Arthritis & Rheumatism 46(2): 328-346 (February, 2002). In a specific embodiment, the RA patient is treated with a CD20 antibody of the invention in conjunction with methotrexate (MTX). An exemplary dosage of MTX is about 7.5-25 mg/kg/wk. MTX can be administered orally and subcutaneously.

[0160] For the treatment of ankylosing spondylitis, psoriatic arthritis and Crohn's disease, the patient can be treated with an antibody of the invention in conjunction with, for example, Remicade® (infliximab; from Centocor Inc., of Malvern, Pa.), ENBREL (etanercept; Immunex, Wash.).

[0161] For treatments for SLE, the patient can be treated with an antibody of the invention in conjunction with, for example, a high-dose corticosteroids and/or cyclophosphamide (HDCC).

[0162] For the treatment of psoriasis, patients can be administered an antibody of this invention in conjunction with topical treatments, such as topical steroids, anthralin, calcipotriene, clobetasol, and tazarotene, or with methotrexate, retinoids, cyclosporine, PUVA and UVB therapies. In one embodiment, the psoriasis patient is treated with the antibody sequentially or concurrently with cyclosporine.

[0163] An “isolated” nucleic acid molecule is a nucleic acid molecule that is identified and separated from at least one contaminant nucleic acid molecule with which it is ordinarily associated in the natural source of the antibody nucleic acid. An isolated nucleic acid molecule is other than in the form or setting in which it is found in nature. Isolated nucleic acid molecules therefore are distinguished from the nucleic acid molecule as it exists in natural cells. However, an isolated nucleic acid molecule includes a nucleic acid molecule contained in cells that ordinarily express the antibody where, for example, the nucleic acid molecule is in a chromosomal location different from that of natural cells.

[0164] The expression “control sequences” refers to DNA sequences necessary for the expression of an operably linked coding sequence in a particular host organism. The control sequences that are suitable for prokaryotes, for example, include a promoter, optionally an operator sequence, and a ribosome binding site. Eukaryotic cells are known to utilize promoters, polyadenylation signals, and enhancers.

[0165] Nucleic acid is “operably linked” when it is placed into a functional relationship with another nucleic acid sequence. For example, DNA for a presequence or secretory leader is operably linked to DNA for a polypeptide if it is expressed as a preprotein that participates in the secretion of the polypeptide; a promoter or enhancer is operably linked to a coding sequence if it affects the transcription of the sequence; or a ribosome binding site is operably linked to a coding sequence if it is positioned so as to facilitate translation. Generally, “operably linked” means that the DNA sequences being linked are contiguous, and, in the case of a secretory leader, contiguous and in reading phase. However, enhancers do not have to be contiguous. Linking is accomplished by ligation at convenient restriction sites. If such sites do not exist, the synthetic oligonucleotide adaptors or linkers are used in accordance with conventional practice.

[0166] As used herein, the expressions “cell,” “cell line,” and “cell culture” are used interchangeably and all such designations include progeny. Thus, the words “transformants” and “transformed cells” include the primary subject cell and cultures derived therefrom without regard for the number of transfers. It is also understood that all progeny may not be precisely identical in DNA content, due to deliberate or inadvertent mutations. Mutant progeny that have the same function or biological activity as screened for in the originally transformed cell are included. Where distinct designations are intended, it will be clear from the context.

II. Modes for Carrying out the Invention

Synthetic high-Affinity Anti-VEGF Antibodies

[0167] The invention herein provides novel anti-VEGF antibodies with high binding affinity to VEGF. Exemplary methods for generating antibodies are described in more detail in the following sections.

[0168] The novel anti-VEGF antibodies are selected using the VEGF antigen derived from a first mammalian species. Preferably the antigen is human VEGF (hVEGF). However, VEGFs from other species such as murine VEGF (mVEGF) can also be used as the first target antigen. The VEGF antigens from various mammalian species may be isolated from natural sources. In other embodiments, the antigen is produced recombinantly or made using other synthetic methods known in the art.

[0169] The antibody selected will normally have a sufficiently strong binding affinity for the first VEGF antigen. For example, the antibody may bind hVEGF with a K_{d} value of no more than about 5 nM, preferably no more than about 2 nM, and more preferably no more than about 500 pM. Antibody affinities may be determined by a surface plasmon resonance based assay (such as the BIAcore assay as described in Examples); enzyme-linked immunoabsorbent assay (ELISA); and competition assays (e.g. RIA's), for example.

[0170] Also, the antibody may be subjected to other biological activity assays, e.g., in order to evaluate its effectiveness as a therapeutic. Such assays are known in the art and depend on the target antigen and intended use for the antibody. Examples include the HUVEC inhibition assay (as described in the Examples below); tumor cell growth inhibition assays (as described in WO 89/06692, for example); antibody-dependent cellular cytotoxicity (ADCC) and complement-mediated cytotoxicity (CDC) assays (U.S. Pat. No. 5,500,362); and agonistic activity or hematopoiesis assays (see WO 95/27062).

[0171] To screen for antibodies which bind to a particular epitope on the antigen of interest, a routine cross-blocking assay such as that described in Antibodies, A Laboratory Manual, Cold Spring Harbor Laboratory, Ed Harlow and David Lane (1988), can be performed. Alternatively, epitope mapping, e.g. as described in Champe et al., J. Biol. Chem. 270:1388-1394 (1995), can be performed to determine whether the antibody binds an epitope of interest.

[0172] Species-specificity of the novel antibodies is then determined. The binding affinity of the antibody for a homologue of the antigen used to select the antibody (where the homologue is from the “second mammalian species”) is assessed using techniques such as those described above. In preferred embodiments, the second mammalian species is a nonhuman mammal to which the antibody will be administered in preclinical studies. Accordingly, the second mammalian species may be a nonhuman primate, such as rhesus, cynomolgus, baboon, chimpanzee and macaque. In other embodiment, the second mammalian species may be a rodent (e.g., mouse or rat), cat or dog, for example.

[0173] While the preferred method of the instant invention for determining species-dependence (and for evaluating antibody mutants with improved properties; see below) is to quantify antibody binding affinity, in other embodiments of the invention, one or more biological properties of the synthetic antibody and antibody variants are evaluated in addition to, or instead of, binding affinity determinations. Exemplary such biological assays are described above. Such assays are particularly useful where they provide an indication as to the therapeutic effectiveness of the antibody. Normally, though not necessarily, antibodies which show improved properties in such assays, will also have an enhanced binding affinity. Thus, in one embodiment of the invention where the assay of choice is a biological activity assay other than an binding affinity assay, the species-dependent antibody will normally have a “biological activity” using “material” (e.g. antigen, cell, tissue, organ or whole animal) from the second mammalian species which is at least about 50 fold, or at least about 500 fold, or at least about 1000 fold, less effective than its biological activity in a corresponding assay using reagents from the first mammalian species.

[0174] The species-dependent antibody is then altered so as to generate an antibody mutant which has a stronger binding affinity for the antigen from the second mammalian species, than the species-dependent antibody. The antibody mutant preferably has a binding affinity for the antigen from the nonhuman mammal which is at least about 10 fold stronger, preferably at least about 20 fold stronger, more preferably at least about 50 fold stronger, and sometimes at least about 100 fold or 200 fold stronger, than the binding affinity of the species-dependent antibody for the antigen. The enhancement in binding affinity desired or required will depend on the initial binding affinity of the species-dependent antibody. Where the assay used is a biological activity assay, the antibody mutant preferably has a biological activity in the assay of choice which is at least about 10 fold better, preferably at least about 20 fold better, more preferably at least about 50 fold better, and sometimes at least about 100 fold or 200 fold better, than the biological activity of the species-dependent antibody in that assay.

[0175] To generate the antibody mutant, one or more amino acid alterations (e.g. substitutions) are introduced in one or more of the hypervariable regions of the species-dependent antibody. Alternatively, or in addition, one or more alterations (e.g. substitutions) of framework region residues may be introduced in the species-dependent antibody where these result in an improvement in the binding affinity of the antibody mutant for the antigen from the second mammalian species. Examples of framework region residues to modify include those which non-covalently bind antigen directly (Amit et al. Science 233:747-753 (1986)); interact with/effect the conformation of a CDR (Chothia et al. J. Mol. Biol. 196:901-917 (1987)); and/or participate in the V_{L}-V_{H} interface (EP 239 400B1). In certain embodiments, modification of one or more of such framework region residues results in an enhancement of the binding affinity of the antibody for the antigen from the second mammalian species. For example, from about one to about five framework residues may be altered in this embodiment of the invention. Sometimes, this may be sufficient to yield an antibody mutant suitable for use in preclinical trials, even where none of the hypervariable region residues have been altered. Normally, however, the antibody mutant will comprise additional hypervariable region alteration(s).

[0176] The hypervariable region residues which are altered may be changed randomly, especially where the starting binding affinity of the species-dependent antibody for the antigen from the second mammalian species is such that such randomly produced antibody mutants can be readily screened.

[0177] One useful procedure for generating such antibody mutants is called “alanine scanning mutagenesis” (Cunningham and Wells Science 244:1081-1085 (1989)). Here, one or more of the hypervariable region residue(s) are replaced by alanine or polyalanine residue(s) to affect the interaction of the amino acids with the antigen from the second mammalian species. Those hypervariable region residue(s) demonstrating functional sensitivity to the substitutions then are refined by introducing further or other mutations at or for the sites of substitution. Thus, while the site for introducing an amino acid sequence variation is predetermined, the nature of the mutation per se need not be predetermined. The ala-mutants produced this way are screened for their biological activity as described herein.

[0178] Another procedure for generating such antibody mutants involves affinity maturation using phage display (Hawkins et al. J. Mol. Biol. 254:889-896 (1992) and Lowman et al. Biochemistry 30(45): 10832-10837 (1991)). Briefly, several hypervariable region sites (e.g. 6-7 sites) are mutated to generate all possible amino substitutions at each site. The antibody mutants thus generated are displayed in a monovalent fashion from filamentous phage particles as fusions to the gene III product of M13 packaged within each particle. The phage-displayed mutants are then screened for their biological activity (e.g. binding affinity) as herein disclosed.

[0179] The invention also provides a more systematic method for identifying amino acid residues to modify. According to this method, one identifies hypervariable region residues in the species-dependent antibody which are involved in binding the antigen from the first mammalian species and those hypervariable region residues involved in binding a homologue of that antigen from the second mammalian species. To achieve this, an alanine-scan of the hypervariable region residues of the species-dependent antibody can be performed, with each ala-mutant being testing for binding to the antigen from the first and second mammalian species. Alternatively, the X-ray crystal structures of antibody-antigen complexes are analyzed for contacting residues as well as surrounding residues (as described in Examples). The hypervariable region residues involved in binding the antigen from the first mammalian species (e.g. human), and those involved in binding the homologue of the antigen from the second mammalian species (e.g. nonhuman mammal) are thereby identified. Preferably, those residue(s) significantly involved in binding the antigen from the second mammalian species (e.g. nonhuman mammal), but not the antigen from the first mammalian species (e.g. human), are chosen as candidates for modification. In another embodiment, those residue(s) significantly involved in binding the antigen from both the first and second mammalian species are selected to be modified (see Example below). In yet a further but less preferred embodiment, those residues involved in binding the antigen from the first mammalian species, but not the second mammalian species, are selected for modification. Such modification can involve deletion of the residue or insertion of one or more residues adjacent to the residue. However, normally the modification involves substitution of the residue for another amino acid.

[0180] Normally one would start with a conservative substitution such as those shown below under the heading of “preferred substitutions”. If such substitutions result in a change in biological activity (e.g. binding affinity), then more substantial changes, denominated “exemplary substitutions” in the following table, or as further described below in reference to amino acid classes, are introduced and the products screened.

[0181] Preferred Substitutions:

| Original | Exemplary | Preferred |
|---|---|---|
| Residue | Substitutions | Substitutions |
| Ala (A) | val; leu; ile | val |
| Arg (R) | lys; gln; asn | lys |
| Asn (N) | gln; his; lys; arg | gln |
| Asp (D) | glu | glu |
| Cys (C) | ser | ser |
| Gln (Q) | asn | asn |
| Glu (E) | asp | asp |
| Gly (G) | pro; ala | ala |
| His (H) | asn; gln; lys; arg | arg |
| Ile (I) | leu; val; met; ala; phe; norleucine | leu |
| Leu (L) | norleucine; ile; val; met; ala; phe | ile |
| Lys (K) | arg; gln; asn | arg |
| Met (M) | leu; phe; ile | leu |
| Phe (F) | leu; val; ile; ala; tyr | leu |
| Pro (P) | ala | ala |
| Ser (S) | thr | thr |
| Thr (T) | ser | ser |
| Trp (W) | tyr; phe | tyr |
| Tyr (Y) | trp; phe; thr; ser | phe |
| Val (V) | ile; leu; met; phe; ala; norleucine | leu |

[0182] Even more substantial modifications in the antibodies biological properties are accomplished by selecting substitutions that differ significantly in their effect on maintaining (a) the structure of the polypeptide backbone in the area of the substitution, for example, as a sheet or helical conformation, (b) the charge or hydrophobicity of the molecule at the target site, or (c) the bulk of the side chain. Naturally occurring residues are divided into groups based on common side-chain properties:

[0183] (1) hydrophobic: norleucine, met, ala, val, leu, ile;

[0184] (2) neutral hydrophilic: cys, ser, thr, asn, gln;

[0185] (3) acidic: asp, glu;

[0186] (4) basic: his, lys, arg;

[0187] (5) residues that influence chain orientation: gly, pro; and

[0188] (6) aromatic: trp, tyr, phe.

[0189] Non-conservative substitutions will entail exchanging a member of one of these classes for another class.

[0190] In another embodiment, the sites selected for modification are affinity matured using phage display (see above).

[0191] Nucleic acid molecules encoding amino acid sequence mutants are prepared by a variety of methods known in the art. These methods include, but are not limited to, oligonucleotide-mediated (or site-directed) mutagenesis, PCR mutagenesis, and cassette mutagenesis of an earlier prepared mutant or a non-mutant version of the species-dependent antibody. The preferred method for making mutants is site directed mutagenesis (see, e.g., Kunkel, Proc. Natl. Acad. Sci. USA 82:488 (1985)).

[0192] In certain embodiments, the antibody mutant will only have a single hypervariable region residue substituted. In other embodiments, two or more of the hypervariable region residues of the species-dependent antibody will have been substituted, e.g. from about two to about ten hypervariable region substitutions. For example, the murinized anti-VEGF antibody variant of the example below had four hypervariable region substitutions.

[0193] Ordinarily, the antibody mutant with improved biological properties will have an amino acid sequence having at least 75% amino acid sequence identity or similarity with the amino acid sequence of either the heavy or light chain variable domain of the species-dependent antibody, more preferably at least 80%, more preferably at least 85%, more preferably at least 90%, and most preferably at least 95%. Identity or similarity with respect to this sequence is defined herein as the percentage of amino acid residues in the candidate sequence that are identical (i.e same residue) or similar (i.e. amino acid residue from the same group based on common side-chain properties, see above) with the species-dependent antibody residues, after aligning the sequences and introducing gaps, if necessary, to achieve the maximum percent sequence identity. None of N-terminal, C-terminal, or internal extensions, deletions, or insertions into the antibody sequence outside of the variable domain shall be construed as affecting sequence identity or similarity.

[0194] Following production of the antibody mutant, the biological activity of that molecule relative to the species-dependent antibody is determined. As noted above, this may involve determining the binding affinity and/or other biological activities of the antibody. In a preferred embodiment of the invention, a panel of antibody mutants are prepared above and are screened for binding affinity for the antigen from the second mammalian species. One or more of the antibody mutants selected from this initial screen are optionally subjected to one or more further biological activity assays to confirm that the antibody mutant(s) with enhanced binding affinity are indeed useful, e.g. for preclinical studies. In preferred embodiments, the antibody mutant retains the ability to bind the antigen from the first mammalian species with a binding affinity similar to the species-dependent antibody. This may be achieved by avoiding altering hypervariable region residues involved in binding the antigen from the first mammalian species. In other embodiments, the antibody mutant may have a significantly altered binding affinity for the antigen from the first mammalian species (e.g. the binding affinity for that antigen is preferably better, but may be worse than the species-dependent antibody).

[0195] The antibody mutant(s) so selected may be subjected to further modifications, oftentimes depending on the intended use of the antibody. Such modifications may involve further alteration of the amino acid sequence, fusion to heterologous polypeptide(s) and/or covalent modifications such as those elaborated below. With respect to amino acid sequence alterations, exemplary modifications are elaborated above. For example, any cysteine residue not involved in maintaining the proper conformation of the antibody mutant also may be substituted, generally with serine, to improve the oxidative stability of the molecule and prevent aberrant cross linking. Conversely, cysteine bond(s) may be added to the antibody to improve its stability (particularly where the antibody is an antibody fragment such as an Fv fragment). Another type of amino acid mutant has an altered glycosylation pattern. This may be achieved by deleting one or more carbohydrate moieties found in the antibody, and/or adding one or more glycosylation sites that are not present in the antibody. Glycosylation of antibodies is typically either N-linked or O-linked. N-linked refers to the attachment of the carbohydrate moiety to the side chain of an asparagine residue. The tripeptide sequences asparagine-X-serine and asparagine-X-threonine, where X is any amino acid except proline, are the recognition sequences for enzymatic attachment of the carbohydrate moiety to the asparagine side chain. Thus, the presence of either of these tripeptide sequences in a polypeptide creates a potential glycosylation site. O-linked glycosylation refers to the attachment of one of the sugars N-aceylgalactosamine, galactose, or xylose to a hydroxyamino acid, most commonly serine or threonine, although 5-hydroxyproline or 5-hydroxylysine may also be used. Addition of glycosylation sites to the antibody is conveniently accomplished by altering the amino acid sequence such that it contains one or more of the above-described tripeptide sequences (for N-linked glycosylation sites). The alteration may also be made by the addition of, or substitution by, one or more serine or threonine residues to the sequence of the original antibody (for O-linked glycosylation sites).

[0196] Techniques for producing antibodies, which may be species-dependent and therefore require modification according to the techniques elaborated herein, follow:

A. Generation of High-Affinity Anti-VEGF Antibodies from Synthetic Antibody Phage Libraries

[0197] The invention also provide a method for generating and selecting novel high-affinity anti-VEGF antibodies using a unique phage display approach. The approach involves generation of synthetic antibody phage libraries based on single framework template, design of sufficient diversities within variable domains, display of polypeptides having the diversified variable domains, selection of candidate antibodies with high affinity to target VEGF antigen, and isolation of the selected antibodies.

[0198] Details of the phage display methods can be found, for example, in the provisional U.S. Application No. 60/385,338 (filed Jun. 3, 2002) and relating applications, the entire disclosures of which are expressly incorporated herein by reference.

[0199] In one aspect, the antibody libraries used in the invention can be generated by mutating the solvent accessible and/or highly diverse positions in at least one CDR of an antibody variable domain. Some or all of the CDRs can be mutated using the methods provided herein. In some embodiments, it may be preferable to generate diverse antibody libraries by mutating positions in CDRH1, CDRH2 and CDRH3 to form a single library or by mutating positions in CDRL3 and CDRH3 to form a single library or by mutating positions in CDRL3 and CDRH1, CDRH2 and CDRH3 to form a single library.

[0200] A library of antibody variable domains can be generated, for example, having mutations in the solvent accessible and/or highly diverse positions of CDRH1, CDRH2 and CDRH3. Another library can be generated having mutations in CDRL1, CDRL2 and CDRL3. These libraries can also be used in conjunction with each other to generate binders of desired affinities. For example, after one or more rounds of selection of heavy chain libraries for binding to a target antigen, a light chain library can be replaced into the population of heavy chain binders for further rounds of selection to increase the affinity of the binders.

[0201] Preferably, a library is created by substitution of original amino acids with variant amino acids in the CDRH3 region of the variable region of the heavy chain sequence. The resulting library can contain a plurality of antibody sequences, wherein the sequence diversity is primarily in the CDRH3 region of the heavy chain sequence.

[0202] In one aspect, the library is created in the context of the humanized antibody 4D5 sequence, or the sequence of the framework amino acids of the humanized antibody 4D5 sequence. Preferably, the library is created by substitution of at least residues 95-100a of the heavy chain with amino acids encoded by the DVK codon set, wherein the DVK codon set is used to encode a set of variant amino acids for every one of these positions. An example of an oligonucleotide set that is useful for creating these substitutions comprises the sequence (DVK)₇. In some embodiments, a library is created by substitution of residues 95-100a with amino acids encoded by both DVK and ANK codon sets. An example of an oligonucleotide set that is useful for creating these substitutions comprises the sequence (DVK)₆ (NNK). In another embodiment, a library is created by substitution of at least residues 95-100a with amino acids encoded by both DVK and NNK codon sets. An example of an oligonucleotide set that is useful for creating these substitutions comprises the sequence (DVK)₅ (NNK). Another example of an oligonucleotide set that is useful for creating these substitutions comprises the sequence (ANK)₆. Other examples of suitable oligonucleotide sequences can be determined by one skilled in the art according to the criteria described herein.

[0203] In another embodiment, different CDRH3 designs are utilized to isolate high affinity binders and to isolate binders for a variety of epitopes. The range of lengths of CDRH3 generated in this library is 11 to 13 amino acids, although lengths different from this can also be generated. H3 diversity can be expanded by using ANK, DVK and NVK codon sets, as well as more limited diversity at N and/or C-terminal.

[0204] Diversity can also be generated in CDRH1 and CDRH2. The designs of CDR-H1 and H2 diversities follow the strategy of targeting to mimic natural antibodies repertoire as described with modification that focus the diversity more closely matched to the natural diversity than previous design.

[0205] For diversity in CDRH3, multiple libraries can be constructed separately with different lengths of H3 and then combined to select for binders to target antigens. The multiple libraries can be pooled and sorted using solid support selection and solution sorting methods as described previously and herein below. Multiple sorting satrategies may be employed. For example, one variation involves sorting on target bound to a solid, followed by sorting for a tag that may be present on the fusion polypeptide (eg. anti-gD tag) and followed by another sort on target bound to solid. Alternatively, the libraries can be sorted first on target bound to a solid surface, the eluted binders are then sorted using solution phase binding with decreasing concentrations of target antigen. Utilizing combinations of different sorting methods provides for minimization of selection of only highly expressed sequences and provides for selection of a number of different high affinity clones.

[0206] High affinity binders for the target VEGF antigen can be isolated from the libraries. Limiting diversity in the H1/H2 region decreases degeneracy about 10⁴ to 10⁵ fold and allowing more H3 diversity provides for more high affinity binders. Utilizing libraries with different types of diversity in CDRH3 (eg. utilizing DVK or NVT) provides for isolation of binders that may bind to different epitopes of a target antigen.

[0207] Of the binders isolated from the pooled libraries as described above, it has been discovered that affinity may be further improved by providing limited diversity in the light chain. Light chain diversity is generated in this embodiment as follows in CDRL1: amino acid position 28 is encoded by RDT; amino acid position 29 is encoded by RKT; amino acid position 30 is encoded by RVW; amino acid position 31 is encoded by ANW; amino acid position 32 is encoded by THT; optionally, amino acid position 33 is encoded by CTG; in CDRL2: amino acid position 50 is encoded by KBG; amino acid position 53 is encoded by AVC; and optionally, amino acid position 55 is encoded by GMA; in CDRL3: amino acid position 91 is encoded by TMT or SRT or both; amino acid position 92 is encoded by DMC; amino acid position 93 is encoded by RVT; amino acid position 94 is encoded by NHT; and amino acid position 96 is encoded by TWT or YKG or both.

[0208] In another embodiment, a library or libraries with diversity in CDRH1, CDRH2 and CDRH3 regions is generated. In this embodiment, diversity in CDRH3 is generated using a variety of lengths of H3 regions and using primarily codon sets XYZ and NNK or ANS. Libraries can be formed using individual oligonucleotides and pooled or oligonucleotides can be pooled to form a subset of libraries. The libraries of this embodiment can be sorted against target bound to solid. Clones isolated from multiple sorts can be screened for specificity and affinity using ELISA assays. For specificity, the clones can be screened against the desired target antigens as well as other nontarget antigens. Those binders to the target VEGF antigen can then be screened for affinity in solution binding competition ELISA assay or spot competition assay. High affinity binders can be isolated from the library utilizing XYZ codon sets prepared as described above. These binders can be readily produced as antibodies or antigen binding fragments in high yield in cell culture.

[0209] In some embodiments, it may be desirable to generate libraries with a greater diversity in lengths of CDRH3 region. For example, it may be desirable to generate libraries with CDRH3 regions ranging from about 7 to 19 amino acids.

[0210] High affinity binders isolated from the libraries of these embodiments are readily produced in bacterial and eukaryotic cell culture in high yield. The vectors can be designed to readily remove sequences such as gD tags, viral coat protein component sequence, and/or to add in constant region sequences to provide for production of full length antibodies or antigen binding fragments in high yield.

[0211] A library with mutations in CDRH3 can be combined with a library containing variant versions of other CDRs, for example CDRL1, CDRL2, CDRL3, CDRH1 and/or CDRH2. Thus, for example, in one embodiment, a CDRH3 library is combined with a CDRL3 library created in the context of the humanized 4D5 antibody sequence with variant amino acids at positions 28, 29, 30, 31, and/or 32 using predetermined codon sets. In another embodiment, a library with mutations to the CDRH3 can be combined with a library comprising variant CDRH1 and/or CDRH2 heavy chain variable domains. In one embodiment, the CDRH1 library is created with the humanized antibody 4D5 sequence with variant amino acids at positions 28, 30, 31, 32 and 33. A CDRH2 library may be created with the sequence of humanized antibody 4D5 with variant amino acids at positions 50, 52, 53, 54, 56 and 58 using the predetermined codon sets.

B. Vectors, Host Cells and Recombinant Methods

[0212] The anti-VEGF antibody of the invention can be produced recombinantly, using techniques and materials readily obtainable.

[0213] For recombinant production of an anti-VEGF antibody, the nucleic acid encoding it is isolated and inserted into a replicable vector for further cloning (amplification of the DNA) or for expression. DNA encoding the antibody is readily isolated or synthethized using conventional procedures (e.g., by using oligonucleotide probes that are capable of binding specifically to DNAs encoding the heavy and light chains of the antibody). Many vectors are available. The vector components generally include, but are not limited to, one or more of the following: a signal sequence, an origin of replication, one or more marker genes, an enhancer element, a promoter, and a transcription termination sequence.

(i) Signal Sequence Component

[0214] The antibody of this invention may be produced recombinantly not only directly, but also as a fusion polypeptide with a heterologous polypeptide, which is preferably a signal sequence or other polypeptide having a specific cleavage site at the N-terminus of the mature protein or polypeptide. The heterologous signal sequence selected preferably is one that is recognized and processed (i.e., cleaved by a signal peptidase) by the host cell. For prokaryotic host cells that do not recognize and process the native antibody signal sequence, the signal sequence is substituted by a prokaryotic signal sequence selected, for example, from the group of the alkaline phosphatase, penicillinase, lpp, or heat-stable enterotoxin II leaders. For yeast secretion the native signal sequence may be substituted by, e.g., the yeast invertase leader, α factor leader (including Saccharomyces and Kluyveromyces α-factor leaders), or acid phosphatase leader, the C. albicans glucoamylase leader, or the signal described in WO 90/13646. In mammalian cell expression, mammalian signal sequences as well as viral secretory leaders, for example, the herpes simplex gD signal, are available.

[0215] The DNA for such precursor region is ligated in reading frame to DNA encoding the antibody.

(ii) Origin of Replication Component

[0216] Both expression and cloning vectors contain a nucleic acid sequence that enables the vector to replicate in one or more selected host cells. Generally, in cloning vectors this sequence is one that enables the vector to replicate independently of the host chromosomal DNA, and includes origins of replication or autonomously replicating sequences. Such sequences are well known for a variety of bacteria, yeast, and viruses. The origin of replication from the plasmid pBR322 is suitable for most Gram-negative bacteria, the 2μ plasmid origin is suitable for yeast, and various viral origins (SV40, polyoma, adenovirus, VSV or BPV) are useful for cloning vectors in mammalian cells. Generally, the origin of replication component is not needed for mammalian expression vectors (the SV40 origin may typically be used only because it contains the early promoter).

(iii) Selection Gene Component

[0217] Expression and cloning vectors may contain a selection gene, also termed a selectable marker. Typical selection genes encode proteins that (a) confer resistance to antibiotics or other toxins, e.g., ampicillin, neomycin, methotrexate, or tetracycline, (b) complement auxotrophic deficiencies, or (c) supply critical nutrients not available from complex media, e.g., the gene encoding D-alanine racemase for Bacilli.

[0218] One example of a selection scheme utilizes a drug to arrest growth of a host cell. Those cells that are successfully transformed with a heterologous gene produce a protein conferring drug resistance and thus survive the selection regimen. Examples of such dominant selection use the drugs neomycin, mycophenolic acid and hygromycin.

[0219] Another example of suitable selectable markers for mammalian cells are those that enable the identification of cells competent to take up the antibody nucleic acid, such as DHFR, thymidine kinase, metallothionein-I and -II, preferably primate metallothionein genes, adenosine deaminase, ornithine decarboxylase, etc.

[0220] For example, cells transformed with the DHFR selection gene are first identified by culturing all of the transformants in a culture medium that contains methotrexate (Mtx), a competitive antagonist of DHFR. An appropriate host cell when wild-type DHFR is employed is the Chinese hamster ovary (CHO) cell line deficient in DHFR activity.

[0221] Alternatively, host cells (particularly wild-type hosts that contain endogenous DHFR) transformed or co-transformed with DNA sequences encoding antibody, wild-type DHFR protein, and another selectable marker such as aminoglycoside 3′-phosphotransferase (APH) can be selected by cell growth in medium containing a selection agent for the selectable marker such as an aminoglycosidic antibiotic, e.g., kanamycin, neomycin, or G418. See U.S. Pat. No. 4,965,199.

[0222] A suitable selection gene for use in yeast is the trp1 gene present in the yeast plasmid YRp7 (Stinchcomb et al., Nature, 282:39 (1979)). The trp1 gene provides a selection marker for a mutant strain of yeast lacking the ability to grow in tryptophan, for example, ATCC No. 44076 or PEP4-1. Jones, Genetics, 85:12 (1977). The presence of the trp1 lesion in the yeast host cell genome then provides an effective environment for detecting transformation by growth in the absence of tryptophan. Similarly, Leu2-deficient yeast strains (ATCC 20,622 or 38,626) are complemented by known plasmids bearing the Leu2 gene.

[0223] In addition, vectors derived from the 1.6 μm circular plasmid pKD1 can be used for transformation of Kluyveromyces yeasts. Alternatively, an expression system for large-scale production of recombinant calf chymosin was reported for K. lactis. Van den Berg, Bio/Technology, 8:135 (1990). Stable multi-copy expression vectors for secretion of mature recombinant human serum albumin by industrial strains of Kluyveromyces have also been disclosed. Fleer et al., Bio/Technology, 9:968-975 (1991).

(iv) Promoter Component

[0224] Expression and cloning vectors usually contain a promoter that is recognized by the host organism and is operably linked to the antibody nucleic acid. Promoters suitable for use with prokaryotic hosts include the phoA promoter, β-lactamase and lactose promoter systems, alkaline phosphatase, a tryptophan (trp) promoter system, and hybrid promoters such as the tac promoter. However, other known bacterial promoters are suitable. Promoters for use in bacterial systems also will contain a Shine-Dalgarno (S.D.) sequence operably linked to the DNA encoding the antibody.

[0225] Promoter sequences are known for eukaryotes. Virtually all eukaryotic genes have an AT-rich region located approximately 25 to 30 bases upstream from the site where transcription is initiated. Another sequence found 70 to 80 bases upstream from the start of transcription of many genes is a CNCAAT region where N may be any nucleotide. At the 3′ end of most eukaryotic genes is an AATAAA sequence that may be the signal for addition of the poly A tail to the 3′ end of the coding sequence. All of these sequences are suitably inserted into eukaryotic expression vectors.

[0226] Examples of suitable promoting sequences for use with yeast hosts include the promoters for 3-phosphoglycerate kinase or other glycolytic enzymes, such as enolase, glyceraldehyde-3-phosphate dehydrogenase, hexokinase, pyruvate decarboxylase, phosphofructokinase, glucose-6-phosphate isomerase, 3-phosphoglycerate mutase, pyruvate kinase, triosephosphate isomerase, phosphoglucose isomerase, and glucokinase.

[0227] Other yeast promoters, which are inducible promoters having the additional advantage of transcription controlled by growth conditions, are the promoter regions for alcohol dehydrogenase 2, isocytochrome C, acid phosphatase, degradative enzymes associated with nitrogen metabolism, metallothionein, glyceraldehyde-3-phosphate dehydrogenase, and enzymes responsible for maltose and galactose utilization. Suitable vectors and promoters for use in yeast expression are further described in EP 73,657. Yeast enhancers also are advantageously used with yeast promoters.

[0228] Antibody transcription from vectors in mammalian host cells is controlled, for example, by promoters obtained from the genomes of viruses such as polyoma virus, fowlpox virus, adenovirus (such as Adenovirus 2), bovine papilloma virus, avian sarcoma virus, cytomegalovirus, a retrovirus, hepatitis-B virus and most preferably Simian Virus 40 (SV40), from heterologous mammalian promoters, e.g., the actin promoter or an immunoglobulin promoter, from heat-shock promoters, provided such promoters are compatible with the host cell systems.

[0229] The early and late promoters of the SV40 virus are conveniently obtained as an SV40 restriction fragment that also contains the SV40 viral origin of replication. The immediate early promoter of the human cytomegalovirus is conveniently obtained as a HindIII E restriction fragment. A system for expressing DNA in mammalian hosts using the bovine papilloma virus as a vector is disclosed in U.S. Pat. No. 4,419,446. A modification of this system is described in U.S. Pat. No. 4,601,978. See also Reyes et al., Nature 297:598-601 (1982) on expression of human β-interferon cDNA in mouse cells under the control of a thymidine kinase promoter from herpes simplex virus. Alternatively, the rous sarcoma virus long terminal repeat can be used as the promoter.

(v) Enhancer Element Component

[0230] Transcription of a DNA encoding the antibody of this invention by higher eukaryotes is often increased by inserting an enhancer sequence into the vector. Many enhancer sequences are now known from mammalian genes (globin, elastase, albumin, α-fetoprotein, and insulin). Typically, however, one will use an enhancer from a eukaryotic cell virus. Examples include the SV40 enhancer on the late side of the replication origin (bp 100-270), the cytomegalovirus early promoter enhancer, the polyoma enhancer on the late side of the replication origin, and adenovirus enhancers. See also Yaniv, Nature 297:17-18 (1982) on enhancing elements for activation of eukaryotic promoters. The enhancer may be spliced into the vector at a position 5′ or 3′ to the antibody-encoding sequence, but is preferably located at a site 5′ from the promoter.

(vi) Transcription Termination Component

[0231] Expression vectors used in eukaryotic host cells (yeast, fungi, insect, plant, animal, human, or nucleated cells from other multicellular organisms) will also contain sequences necessary for the termination of transcription and for stabilizing the mRNA. Such sequences are commonly available from the 5′ and, occasionally 3′, untranslated regions of eukaryotic or viral DNAs or cDNAs. These regions contain nucleotide segments transcribed as polyadenylated fragments in the untranslated portion of the mRNA encoding the antibody. One useful transcription termination component is the bovine growth hormone polyadenylation region. See WO94/11026 and the expression vector disclosed therein.

(vii) Selection and Transformation of Host Cells

[0232] Suitable host cells for cloning or expressing the DNA in the vectors herein are the prokaryote, yeast, or higher eukaryote cells described above. Suitable prokaryotes for this purpose include eubacteria, such as Gram-negative or Gram-positive organisms, for example, Enterobacteriaceae such as Escherichia, e.g., E. coli, Enterobacter, Erwinia, Klebsiella, Proteus, Salmonella, e.g., Salmonella typhimurium, Serratia, e.g., Serratia marcescans, and Shigella, as well as Bacilli such as B. subtilis and B. licheniformis (e.g., B. licheniformis 41P disclosed in DD 266,710 published 12 Apr. 1989), Pseudomonas such as P. aeruginosa, and Streptomyces. One preferred E. coli cloning host is E. coli 294 (ATCC 31,446), although other strains such as E. coli B, E. coli X1776 (ATCC 31,537), and E. coli W3110 (ATCC 27,325) are suitable. These examples are illustrative rather than limiting.

[0233] In addition to prokaryotes, eukaryotic microbes such as filamentous fungi or yeast are suitable cloning or expression hosts for antibody-encoding vectors. Saccharomyces cerevisiae, or common baker's yeast, is the most commonly used among lower eukaryotic host microorganisms. However, a number of other genera, species, and strains are commonly available and useful herein, such as Schizosaccharomyces pombe; Kluyveromyces hosts such as, e.g., K. lactis, K. fragilis (ATCC 12,424), K bulgaricus (ATCC 16,045), K. wickeramii (ATCC 24,178), K. waltii (ATCC 56,500), K. drosophilarum (ATCC 36,906), K. thermotolerans, and K. marxianus; yarrowia (EP 402,226); Pichia pastoris (EP 183,070); Candida; Trichoderma reesia (EP 244,234); Neurospora crassa; Schwanniomyces such as Schwanniomyces occidentalis; and filamentous fungi such as, e.g., Neurospora, Penicillium, Tolypocladium, and Aspergillus hosts such as A. nidulans and A. niger.

[0234] Suitable host cells for the expression of glycosylated antibody are derived from multicellular organisms. Examples of invertebrate cells include plant and insect cells. Numerous baculoviral strains and variants and corresponding permissive insect host cells from hosts such as Spodoptera frugiperda (caterpillar), Aedes aegypti (mosquito), Aedes albopictus (mosquito), Drosophila melanogaster (fruitfly), and Bombyx mori have been identified. A variety of viral strains for transfection are publicly available, e.g., the L-1 variant of Autographa californica NPV and the Bm-5 strain of Bombyx mori NPV, and such viruses may be used as the virus herein according to the present invention, particularly for transfection of Spodoptera frugiperda cells. Plant cell cultures of cotton, corn, potato, soybean, petunia, tomato, and tobacco can also be utilized as hosts.

[0235] However, interest has been greatest in vertebrate cells, and propagation of vertebrate cells in culture (tissue culture) has become a routine procedure. Examples of useful mammalian host cell lines are monkey kidney CV1 line transformed by SV40 (COS-7, ATCC CRL 1651); human embryonic kidney line (293 or 293 cells subcloned for growth in suspension culture, Graham et al., J. Gen Virol. 36:59 (1977)); baby hamster kidney cells (BHK, ATCC CCL 10); Chinese hamster ovary cells/-DHFR(CHO, Urlaub et al., Proc. Natl. Acad. Sci. USA 77:4216 (1980)); mouse sertoli cells (TM4, Mather, Biol. Reprod. 23:243-251 (1980)); monkey kidney cells (CV1 ATCC CCL 70); African green monkey kidney cells (VERO-76, ATCC CRL-1587); human cervical carcinoma cells (HELA, ATCC CCL 2); canine kidney cells (MDCK, ATCC CCL 34); buffalo rat liver cells (BRL 3A, ATCC CRL 1442); human lung cells (W138, ATCC CCL 75); human liver cells (Hep G2, HB 8065); mouse mammary tumor (MMT 060562, ATCC CCL51); TR1 cells (Mather et al., Annals N.Y. Acad. Sci. 383:44-68 (1982)); MRC 5 cells; FS4 cells; and a human hepatoma line (Hep G2).

[0236] Host cells are transformed with the above-described expression or cloning vectors for antibody production and cultured in conventional nutrient media modified as appropriate for inducing promoters, selecting transformants, or amplifying the genes encoding the desired sequences.

(viii) Culturing the Host Cells

[0237] The host cells used to produce the antibody of this invention may be cultured in a variety of media. Commercially available media such as Ham's F10 (Sigma), Minimal Essential Medium ((MEM), (Sigma), RPMI-1640 (Sigma), and Dulbecco's Modified Eagle's Medium ((DMEM), Sigma) are suitable for culturing the host cells. In addition, any of the media described in Ham et al., Meth. Enz. 58:44 (1979), Barnes et al., Anal. Biochem. 102:255 (1980), U.S. Pat. Nos. 4,767,704; 4,657,866; 4,927,762; 4,560,655; or 5,122,469; WO 90/03430; WO 87/00195; or U.S. Patent Re. 30,985 may be used as culture media for the host cells. Any of these media may be supplemented as necessary with hormones and/or other growth factors (such as insulin, transferrin, or epidermal growth factor), salts (such as sodium chloride, calcium, magnesium, and phosphate), buffers (such as HEPES), nucleotides (such as adenosine and thymidine), antibiotics (such as GENTAMYCIN™drug), trace elements (defined as inorganic compounds usually present at final concentrations in the micromolar range), and glucose or an equivalent energy source. Any other necessary supplements may also be included at appropriate concentrations that would be known to those skilled in the art. The culture conditions, such as temperature, pH, and the like, are those previously used with the host cell selected for expression, and will be apparent to the ordinarily skilled artisan.

(ix) Antibody Purification

[0238] When using recombinant techniques, the antibody can be produced intracellularly, in the periplasmic space, or directly secreted into the medium. If the antibody is produced intracellularly, as a first step, the particulate debris, either host cells or lysed fragments, is removed, for example, by centrifugation or ultrafiltration. Carter et al., Bio/Technology 10: 163-167 (1992) describe a procedure for isolating antibodies which are secreted to the periplasmic space of E. coli. Briefly, cell paste is thawed in the presence of sodium acetate (pH 3.5), EDTA, and phenylmethylsulfonylfluoride (PMSF) over about 30 min. Cell debris can be removed by centrifugation. Where the antibody is secreted into the medium, supernatants from such expression systems are generally first concentrated using a commercially available protein concentration filter, for example, an Amicon or Millipore Pellicon ultrafiltration unit. A protease inhibitor such as PMSF may be included in any of the foregoing steps to inhibit proteolysis and antibiotics may be included to prevent the growth of adventitious contaminants.

[0239] The antibody composition prepared from the cells can be purified using, for example, hydroxylapatite chromatography, gel electrophoresis, dialysis, and affinity chromatography, with affinity chromatography being the preferred purification technique. The suitability of protein A as an affinity ligand depends on the species and isotype of any immunoglobulin Fc domain that is present in the antibody. Protein A can be used to purify antibodies that are based on human γ1, γ2, or γ4 heavy chains (Lindmark et al., J. Immunol. Meth. 62:1-13 (1983)). Protein G is recommended for all mouse isotypes and for human γ3 (Guss et al., EMBO J. 5:15671575 (1986)). The matrix to which the affinity ligand is attached is most often agarose, but other matrices are available. Mechanically stable matrices such as controlled pore glass or poly(styrenedivinyl)benzene allow for faster flow rates and shorter processing times than can be achieved with agarose. Where the antibody comprises a CH3 domain, the Bakerbond ABX™resin (J. T. Baker, Phillipsburg, N.J.) is useful for purification. Other techniques for protein purification such as fractionation on an ion-exchange column, ethanol precipitation, Reverse Phase HPLC, chromatography on silica, chromatography on heparin SEPHAROSE™ chromatography on an anion or cation exchange resin (such as a polyaspartic acid column), chromatofocusing, SDS-PAGE, and ammonium sulfate precipitation are also available depending on the antibody to be recovered.

[0240] Following any preliminary purification step(s), the mixture comprising the antibody of interest and contaminants may be subjected to low pH hydrophobic interaction chromatography using an elution buffer at a pH between about 2.5-4.5, preferably performed at low salt concentrations (e.g., from about 0-0.25M salt).

C. Pharmaceutical Formulations

[0241] Therapeutic formulations of the antibody are prepared for storage by mixing the antibody having the desired degree of purity with optional physiologically acceptable carriers, excipients or stabilizers (Remington's Pharmaceutical Sciences 16th edition, Osol, A. Ed. (1980)), in the form of lyophilized formulations or aqueous solutions. Acceptable carriers, excipients, or stabilizers are nontoxic to recipients at the dosages and concentrations employed, and include buffers such as phosphate, citrate, and other organic acids; antioxidants including ascorbic acid and methionine; preservatives (such as octadecyldimethylbenzyl ammonium chloride; hexamethonium chloride; benzalkonium chloride, benzethonium chloride; phenol, butyl or benzyl alcohol; alkyl parabens such as methyl or propyl paraben; catechol; resorcinol; cyclohexanol; 3-pentanol; and m-cresol); low molecular weight (less than about 10 residues) polypeptide; proteins, such as serum albumin, gelatin, or immunoglobulins; hydrophilic polymers such as polyvinylpyrrolidone; amino acids such as glycine, glutamine, asparagine, histidine, arginine, or lysine; monosaccharides, disaccharides, and other carbohydrates including glucose, mannose, or dextrins; chelating agents such as EDTA; sugars such as sucrose, mannitol, trehalose or sorbitol; salt-forming counter-ions such as sodium; metal complexes (e.g., Zn-protein complexes); and/or non-ionic surfactants such as TWEEN™, PLURONICS™ or polyethylene glycol (PEG).

[0242] The formulation herein may also contain more than one active compound as necessary for the particular indication being treated, preferably those with complementary activities that do not adversely affect each other. For example, it may be desirable to further provide an immunosuppressive agent. Such molecules are suitably present in combination in amounts that are effective for the purpose intended.

[0243] The active ingredients may also be entrapped in microcapsule prepared, for example, by coacervation techniques or by interfacial polymerization, for example, hydroxymethylcellulose or gelatin-microcapsule and poly-(methylmethacylate) microcapsule, respectively, in colloidal drug delivery systems (for example, liposomes, albumin microspheres, microemulsions, nano-particles and nanocapsules) or in macroemulsions. Such techniques are disclosed in Remington's Pharmaceutical Sciences 16th edition, Osol, A. Ed. (1980).

[0244] The formulations to be used for in vivo administration must be sterile. This is readily accomplished by filtration through sterile filtration membranes.

[0245] Sustained-release preparations may be prepared. Suitable examples of sustained-release preparations include semipermeable matrices of solid hydrophobic polymers containing the antibody, which matrices are in the form of shaped articles, e.g., films, or microcapsule. Examples of sustained-release matrices include polyesters, hydrogels (for example, poly(2-hydroxyethyl-methacrylate), or poly(vinylalcohol)), polylactides (U.S. Pat. No. 3,773,919), copolymers of L-glutamic acid and γ ethyl-L-glutamate, non-degradable ethylene-vinyl acetate, degradable lactic acid-glycolic acid copolymers such as the LUPRON DEPOT™ (injectable microspheres composed of lactic acid-glycolic acid copolymer and leuprolide acetate), and poly-D-(−)-3-hydroxybutyric acid. While polymers such as ethylene-vinyl acetate and lactic acid-glycolic acid enable release of molecules for over 100 days, certain hydrogels release proteins for shorter time periods. When encapsulated antibodies remain in the body for a long time, they may denature or aggregate as a result of exposure to moisture at 37° C., resulting in a loss of biological activity and possible changes in immunogenicity. Rational strategies can be devised for stabilization depending on the mechanism involved. For example, if the aggregation mechanism is discovered to be intermolecular S—S bond formation through thio-disulfide interchange, stabilization may be achieved by modifying sulfhydryl residues, lyophilizing from acidic solutions, controlling moisture content, using appropriate additives, and developing specific polymer matrix compositions.

D. Non-Therapeutic Uses for the Antibody

[0246] The antibodies of the invention may be used as affinity purification agents. In this process, the antibodies are immobilized on a solid phase such a Sephadex resin or filter paper, using methods well known in the art. The immobilized antibody is contacted with a sample containing the antigen to be purified, and thereafter the support is washed with a suitable solvent that will remove substantially all the material in the sample except the antigen to be purified, which is bound to the immobilized antibody. Finally, the support is washed with another suitable solvent, such as glycine buffer, pH 5.0, that will release the antigen from the antibody.

[0247] The antibodies of this invention may also be useful in diagnostic assays, e.g., for detecting expression of an antigen of interest in specific cells, tissues, or serum.

[0248] For diagnostic applications, the antibody typically will be labeled with a detectable moiety. Numerous labels are available which can be generally grouped into the following categories:

[0249] (a) Radioisotopes, such as ³⁵S, ¹⁴C, ¹²⁵I, ³H, and ¹³¹I. The antibody can be labeled with the radioisotope using the techniques described in Current Protocols in Immunology, Volumes 1 and 2, Coligen et al., Ed. Wiley-Interscience, New York, N.Y., Pubs. (1991) for example and radioactivity can be measured using scintillation counting.

[0250] (b) Fluorescent labels such as rare earth chelates (europium chelates) or fluorescein and its derivatives, rhodamine and its derivatives, dansyl, Lissamine, phycoerythrin and Texas Red are available. The fluorescent labels can be conjugated to the antibody using the techniques disclosed in Current Protocols in Immunology, supra, for example. Fluorescence can be quantified using a fluorimeter.

[0251] (c) Various enzyme-substrate labels are available and U.S. Pat. No. 4,275,149 provides a review of some of these. The enzyme generally catalyzes a chemical alteration of the chromogenic substrate which can be measured using various techniques. For example, the enzyme may catalyze a color change in a substrate, which can be measured spectrophotometrically. Alternatively, the enzyme may alter the fluorescence or chemiluminescence of the substrate. Techniques for quantifying a change in fluorescence are described above. The chemiluminescent substrate becomes electronically excited by a chemical reaction and may then emit light which can be measured (using a chemiluminometer, for example) or donates energy to a fluorescent acceptor. Examples of enzymatic labels include luciferases (e.g., firefly luciferase and bacterial luciferase; U.S. Pat. No. 4,737,456), luciferin, 2,3-dihydrophthalazinediones, malate dehydrogenase, urease, peroxidase such as horseradish peroxidase (HRPO), alkaline phosphatase, β-galactosidase, glucoamylase, lysozyme, saccharide oxidases (e.g., glucose oxidase, galactose oxidase, and glucose-6-phosphate dehydrogenase), heterocyclic oxidases (such as uricase and xanthine oxidase), lactoperoxidase, microperoxidase, and the like. Techniques for conjugating enzymes to antibodies are described in O'Sullivan et al., Methods for the Preparation of Enzyme-Antibody Conjugates for use in Enzyme Immunoassay, in Methods in Enzym. (ed J. Langone & H. Van Vunakis), Academic press, New York, 73:147-166 (1981).

[0252] Examples of enzyme-substrate combinations include, for example:

[0253] (i) Horseradish peroxidase (HRPO) with hydrogen peroxidase as a substrate, wherein the hydrogen peroxidase oxidizes a dye precursor (e.g., orthophenylene diamine (OPD) or 3,3′,5,5′-tetramethyl benzidine hydrochloride (TMB));

[0254] (ii) alkaline phosphatase (AP) with para-Nitrophenyl phosphate as chromogenic substrate; and

[0255] (iii) β-D-galactosidase (β-D-Gal) with a chromogenic substrate (e.g., p-nitrophenyl-β-D-galactosidase) or fluorogenic substrate 4-methylumbelliferyl-β-D-galactosidase.

[0256] Numerous other enzyme-substrate combinations are available to those skilled in the art. For a general review of these, see U.S. Pat. Nos. 4,275,149 and 4,318,980.

[0257] Sometimes, the label is indirectly conjugated with the antibody. The skilled artisan will be aware of various techniques for achieving this. For example, the antibody can be conjugated with biotin and any of the three broad categories of labels mentioned above can be conjugated with avidin, or vice versa. Biotin binds selectively to avidin and thus, the label can be conjugated with the antibody in this indirect manner. Alternatively, to achieve indirect conjugation of the label with the antibody, the antibody is conjugated with a small hapten (e.g., digoxin) and one of the different types of labels mentioned above is conjugated with an anti-hapten antibody (e.g., anti-digoxin antibody). Thus, indirect conjugation of the label with the antibody can be achieved.

[0258] In another embodiment of the invention, the antibody need not be labeled, and the presence thereof can be detected using a labeled antibody which binds to the antibody.

[0259] The antibodies of the present invention may be employed in any known assay method, such as competitive binding assays, direct and indirect sandwich assays, and immunoprecipitation assays. Zola, Monoclonal Antibodies: A Manual of Techniques, pp. 147-158 (CRC Press, Inc. 1987).

[0260] Competitive binding assays rely on the ability of a labeled standard to compete with the test sample analyze for binding with a limited amount of antibody. The amount of antigen in the test sample is inversely proportional to the amount of standard that becomes bound to the antibodies. To facilitate determining the amount of standard that becomes bound, the antibodies generally are insolubilized before or after the competition, so that the standard and analyze that are bound to the antibodies may conveniently be separated from the standard and analyze which remain unbound.

[0261] Sandwich assays involve the use of two antibodies, each capable of binding to a different immunogenic portion, or epitope, of the protein to be detected. In a sandwich assay, the test sample analyze is bound by a first antibody which is immobilized on a solid support, and thereafter a second antibody binds to the analyze, thus forming an insoluble three-part complex. See, e.g., U.S. Pat. No. 4,376,110. The second antibody may itself be labeled with a detectable moiety (direct sandwich assays) or may be measured using an anti-immunoglobulin antibody that is labeled with a detectable moiety (indirect sandwich assay). For example, one type of sandwich assay is an ELISA assay, in which case the detectable moiety is an enzyme.

[0262] For immunohistochemistry, the tumor sample may be fresh or frozen or may be embedded in paraffin and fixed with a preservative such as formalin, for example.

[0263] The antibodies may also be used for in vivo diagnostic assays. Generally, the antibody is labeled with a radionuclide (such as ¹¹¹In, ⁹⁹Tc, ¹⁴C, ¹³¹I, ¹²⁵I, ³H, ³²P or ³⁵S) or a dye so that the tumor can be localized using immunoscintiography.

[0264] In one embodiment, a method of detecting VEGF in a biological sample (e.g., tissue, blood, sera, spinal fluid) or a prepared biological sample can comprise the step of contacting an antibody of this invention with the sample and observing the anti-VEGF antibody bound to the VEGF in the sample or determining the amount of the anti-VEGF antibody bound to VEGF in the sample. In another embodiment, a method of detecting VEGF in a subject comprises the step of administering an antibody of this invention to the subject and observing the anti-VEGF antibody bound to the VEGF in the subject or determining the amount of the anti-VEGF antibody bound to VEGF in the subject (e.g., human, mouse, rabbit, rat, etc).

E. Diagnostic Kits

[0265] As a matter of convenience, the antibody of the present invention can be provided in a kit, i.e., a packaged combination of reagents in predetermined amounts with instructions for performing the diagnostic assay. Where the antibody is labeled with an enzyme, the kit will include substrates and cofactors required by the enzyme (e.g., a substrate precursor which provides the detectable chromophore or fluorophore). In addition, other additives may be included such as stabilizers, buffers (e.g., a block buffer or lysis buffer) and the like. The relative amounts of the various reagents may be varied widely to provide for concentrations in solution of the reagents which substantially optimize the sensitivity of the assay. Particularly, the reagents may be provided as dry powders, usually lyophilized, including excipients which on dissolution will provide a reagent solution having the appropriate concentration.

F. In Vivo Uses for the Antibody

[0266] It is contemplated that the antibody of the present invention may be used to treat a mammal. In one embodiment, the antibody is administered to a nonhuman mammal for the purposes of obtaining preclinical data, for example. Exemplary nonhuman mammals to be treated include nonhuman primates, dogs, cats, rodents and other mammals in which preclinical studies are performed. Such mammals may be established animal models for a disease to be treated with the antibody or may be used to study toxicity of the antibody of interest. In each of these embodiments, dose escalation studies may be performed in the mammal. Where the antibody is an anti-VEGF antibody, it may be administered to a host rodent in a solid tumor model, for example.

[0267] In addition, or in the alternative, the antibody is used to treat a human, e.g. a patient suffering from a disease or disorder who could benefit from administration of the antibody. The conditions which can be treated with the antibody are many and include conditions arising from or exacerbated by abnormal angiogenesis, e.g., by excessive, inappropriate or uncontrolled angiogenesis. For example, such conditions include, cancer such as colorectal cancer and NSCLS and others described above and inflammatory diseases such as rheumatoid arthritis and others described above.

[0268] The following references describe lymphomas and CLL, their diagnoses, treatment and standard medical procedures for measuring treatment efficacy. Canellos G P, Lister, T A, Sklar J L: The Lymphomas. W.B.Saunders Company, Philadelphia, 1998; van Besien K and Cabanillas, F: Clinical Manifestations, Staging and Treatment of Non-Hodgkin's Lymphoma, Chap. 70, pp 1293-1338, in: Hematology, Basic Principles and Practice, 3rd ed. Hoffman et al. (editors). Churchill Livingstone, Philadelphia, 2000; and Rai, K and Patel, D:Chronic Lymphocytic Leukemia, Chap. 72, pp 1350-1362, in: Hematology, Basic Principles and Practice, 3rd ed. Hoffman et al. (editors). Churchill Livingstone, Philadelphia, 2000. The parameters for assessing efficacy or success of treatment of an autoimmune or autoimmune related disease will be known to the physician of skill in the appropriate disease. Generally, the physician of skill will look for reduction in the signs and symptoms of the specific disease. The following are by way of examples.

[0269] In one embodiment, the methods and compositions of the invention are useful to treat rheumatoid arthritis. RA is characterized by inflammation of multiple joints, cartilage loss and bone erosion that leads to joint destruction and ultimately reduced joint function. Additionally, since RA is a systemic disease, it can have effects in other tissues such as the lungs, eyes and bone marrow.

[0270] The VEGF binding antibodies can be used as first-line therapy in patients with early RA (i.e., methotrexate (MTX) naive), or in combination with, e.g., MTX or cyclophosphamide. Or, the antibodies can be used in treatment as second-line therapy for patients who were DMARD and/or MTX refractory, in combination with, e.g., MTX. In one preferred embodiment, the VEGF binding antibodies of this invention are administered to mammals who are DMARD and/or MTX refractory. The anti-VEGF antibodies are useful to prevent and control joint damage, delay structural damage, decrease pain associated with inflammation in RA, and generally reduce the signs and symptoms in moderate to severe RA. The RA patient can be treated with the anti-VEGF antibodies of this invention prior to, after or together with treatment with other drugs used in treating RA (see combination therapy below). In one embodiment, patients who had previously failed disease-modifying antirheumatic drugs and/or had an inadequate response to methotrexate alone are treated with an anti-VEGF binding antibody. In another embodiment, the patients are administered an anti-VEGF antibody of this invention plus cyclophosphamide or anti-VEGF binding antibody plus methotrexate.

[0271] One method of evaluating treatment efficacy in RA is based on American College of Rheumatology (ACR) criteria, which measures the percentage of improvement in tender and swollen joints, among other things. The RA patient can be scored at for example, ACR 20 (20 percent improvement) compared with no antibody treatment (e.g, baseline before treatment) or treatment with placebo. Other ways of evaluating the efficacy of antibody treatment include X-ray scoring such as the Sharp X-ray score used to score structural damage such as bone erosion and joint space narrowing. Patients can also be evaluated for the prevention of or improvement in disability based on Health Assessment Questionnaire [HAQ] score, AIMS score, SF-36 at time periods during or after treatment. The ACR 20 criteria may include 20% improvement in both tender (painful) joint count and swollen joint count plus a 20% improvement in at least 3 of 5 additional measures:

1. patient's pain assessment by visual analog scale (VAS),

2. patient's global assessment of disease activity (VAS),

3. physician's global assessment of disease activity (VAS),

4. patient's self-assessed disability measured by the Health Assessment Questionnaire, and

5. acute phase reactants, CRP or ESR.

[0272] The ACR 50 and 70 are defined analogously. Preferably, the patient is administered an amount of anti-VEGF binding antibody of the invention alone or in combination with other agents for treating rheumatoid arthritis effective to achieve at least a score of ACR 20, preferably at least ACR 30, more preferably at least ACR50, even more preferably at least ACR70, most preferably at least ACR 75 and higher.

[0273] Psoriatic arthritis has unique and distinct radiographic features. For psoriatic arthritis, joint erosion and joint space narrowing can be evaluated by the Sharp score as well. The anti-VEGF binding antibodies disclosed herein can be used to prevent the joint damage as well as reduce disease signs and symptoms of the disorder.

[0274] The antibody is administered by any suitable means, including parenteral, subcutaneous, intraperitoneal, intrapulmonary, and intranasal, and, if desired for local immunosuppressive treatment, intralesional administration. Parenteral infusions include intramuscular, intravenous, intraarterial, intraperitoneal, or subcutaneous administration. In addition, the antibody is suitably administered by pulse infusion, particularly with declining doses of the antibody. Preferably the dosing is given by injections, most preferably intravenous or subcutaneous injections, depending in part on whether the administration is brief or chronic.

[0275] For the prevention or treatment of disease, the appropriate dosage of antibody will depend on the type of disease to be treated, the severity and course of the disease, whether the antibody is administered for preventive or therapeutic purposes, previous therapy, the patient's clinical history and response to the antibody, and the discretion of the attending physician. The antibody is suitably administered to the patient at one time or over a series of treatments.

[0276] Depending on the type and severity of the disease, about 1 μg/kg to 15 mg/kg (e.g., 0.1-20 mg/kg) of antibody is an initial candidate dosage for administration to the patient, whether, for example, by one or more separate administrations, or by continuous infusion. A typical daily dosage might range from about 1 μg/kg to 100 mg/kg or more, depending on the factors mentioned above. For repeated administrations over several days or longer, depending on the condition, the treatment is sustained until a desired suppression of disease symptoms occurs. However, other dosage regimens may be useful. The progress of this therapy is easily monitored by conventional techniques and assays. An exemplary dosing regimen for an anti-LFA-1 or anti-ICAM-1 antibody is disclosed in WO 94/04188. Exemplary dosing regimens and therapeutic combinations for treating cancer can be found in U.S. Provisional Application No. 60/474,480, filed May 30, 2003.

[0277] The antibody composition will be formulated, dosed, and administered in a fashion consistent with good medical practice. Factors for consideration in this context include the particular disorder being treated, the particular mammal being treated, the clinical condition of the individual patient, the cause of the disorder, the site of delivery of the agent, the method of administration, the scheduling of administration, and other factors known to medical practitioners. The “therapeutically effective amount” of the antibody to be administered will be governed by such considerations, and is the minimum amount necessary to prevent, ameliorate, or treat a disease or disorder. The antibody need not be, but is optionally formulated with one or more agents currently used to prevent or treat the disorder in question. The effective amount of such other agents depends on the amount of antibody present in the formulation, the type of disorder or treatment, and other factors discussed above. These are generally used in the same dosages and with administration routes as used hereinbefore or about from 1 to 99% of the heretofore employed dosages. Generally, alleviation or treatment of a disease or disorder involves the lessening of one or more symptoms or medical problems associated with the disease or disorder. In the case of cancer, the therapeutically effective amount of the drug can accomplish one or a combination of the following: reduce the number of cancer cells; reduce the tumor size; inhibit (i.e., to decrease to some extent and/or stop) cancer cell infiltration into peripheral organs; inhibit tumor metastasis; inhibit, to some extent, tumor growth; and/or relieve to some extent one or more of the symptoms associated with the cancer. To the extent the drug may prevent growth and/or kill existing cancer cells, it may be cytostatic and/or cytotoxic. In some embodiments, a composition of this invention can be used to prevent the onset or reoccurrence of the disease or disorder in a subject or mammal.

G. Articles of Manufacture

[0278] In another embodiment of the invention, an article of manufacture containing materials useful for the treatment of the disorders described above is provided. The article of manufacture comprises a container and a label. Suitable containers include, for example, bottles, vials, syringes, and test tubes. The containers may be formed from a variety of materials such as glass or plastic. The container holds a composition which is effective for treating the condition and may have a sterile access port (for example the container may be an intravenous solution bag or a vial having a stopper pierceable by a hypodermic injection needle). The active agent in the composition is the antibody. The label on, or associated with, the container indicates that the composition is used for treating the condition of choice. The article of manufacture may further comprise a second container comprising a pharmaceutically-acceptable buffer, such as phosphate-buffered saline, Ringer's solution and dextrose solution. It may further include other materials desirable from a commercial and user standpoint, including other buffers, diluents, filters, needles, syringes, and package inserts with instructions for use.

[0279] Incorporated by reference in their entirety are United States Provisional Applications from which this application claims benefit: U.S. Ser. No. 60/491,877, filed Aug. 1, 2003; U.S. Ser. No. 60/516,495, filed Nov. 1, 2003; U.S. Ser. No. 60/570,912, filed May 12, 2004; U.S. Ser. No. 60/571,239, filed May 13, 2004; U.S. Ser. No. 60/576,315, filed Jun. 1, 2004; and U.S. Ser. No. 60/580,757, filed Jun. 18, 2004.

[0280] The following examples are intended merely to illustrate the practice of the present invention and are not provided by way of limitation. The disclosures of all patent and scientific literatures cited herein are expressly incorporated in their entirety by reference.

### EXAMPLES

Generation of the Synthetic Antibody Phage Libraries

[0281] In general, two types of combinatorial antibody libraries have been developed, distinguished by the source of repertoires. Most libraries to date are “natural” antibody libraries which used the natural repertoires as the source for its diversity, where the genes as message RNA of immune cells from naïve or immunized animals or human were amplified and cloned into vector for phage display or other display technology, such as ribosome or yeast display. The natural antibodies usually have multiple frameworks, which together with variable CDRs sequences and the recombination of light chain and heavy chain made up the diversity of the library. The size of the library determined the performance of the libraries since the repertoires were in general larger than the library size (marks et al). The synthetic library, on the other hand, is a new branch of library where the diversity is designed and built into the library with synthetic DNA. Single or multiple frameworks have been used. For single framework library, the source of the diversity solely depends on the degeneracy of synthetic DNA designed to create the diverse CDR loops. Both the diversity design and the size of the libraries are critical for the library performance, which can be measured by the affinity of the antibodies found from the libraries.

[0282] We developed a strategy of building synthetic antibody phage library upon the template of a single framework. Residues were selected from CDR loops that are either solvent exposed or highly variable in natural antibodies repertoires according to Kabat database and were randomized by mimicking the natural diversity using tailored codons. We also explored restricting the randomization to heavy chain, which often contribute to the main binding interaction with antigen among natural antibodies, and found it was sufficient to find binders to naïve targets. One of the reasons to restrict the diversity is so that the gap between the DNA degeneracy and practical phage library size is not overwhelmingly large and the sequence space will be covered at sufficient density.

[0283] The first library was built on humanized 4D5 framework with a randomized heavy chain and fixed light chain in the format of single chain Fv (ScFv). To the target antigen murine VEGF (mVEGF), many unique binders were found.

[0284] The libraries were then generally further improved by fine-tuning the diversity of CDR-H1 and H2 or the light chain to closely mimic the natural diversity, and by exploring the diversity design of CDR-H3 in the Fab format of display. See FIG. 1 for illustrations of different types of antibody libraries. We found libraries with different designs of CDR-H3 of similar size resulted in binders of hVEGF and mVEGF with sub-nM affinity. The affinity of these binders can be further improved to pM range by a second step of randomizing their light chain CDRs.

[0285] For details of strategies and methods for generating synthetic antibody libraries with single template, see, for example, U.S. provisional application U.S. Ser. No. 60/385,338 (filed Jun. 3, 2002), the entire disclosure of which is expressly incorporated herein by reference. Thus, novel antibodies with high affinity to both human VEGF and mouse VEGF could be found in diverse synthetic antibody phage libraries based on a single framework template.

### Example 1

### G6 and B20 Derived Antibodies

[0286] (a) Selection of High Affinity Anti-VEGF Fab Clones

[0287] The selection procedures for high affinity anti-VEGF Fab clones consisted of various combinations of solid-supported and solution-binding sortings. In solid-supported sortings, the antibody phage library was panned with target antigen coated on NUNC 96-well Maxisorp immunoplate at concentration of 5 ug/ml. In solution-binding sorting method, phage library was incubated with decreasing concentration of biotinylated antigen in solution, which then was captured by neutravidin coated on the 96-well Maxisorp plate (2˜5 ug/ml). Decreasing concentration allowed more stringency in panning to fish for tighter binders. To the target antigen mVEGF, a two-step sorting strategy was developed such that, in step 1, potent binders were isolated from naïve libraries by means of the solid-supported selection, and subsequently in step 2, those stronger affinity binders could be isolated from weaker ones by the progressive solution-binding method with decreasing target antigen concentration. To quickly screen out these binders, the high throughput single-spot competition binding ELISA was used. Low amount of mVEGF (25 nM) was applied in this assay to screen 16 clones from each library after the 3^{rd} round sorting.

[0288] As the result of combining solid-supported and solution-binding sortings, three Fab clones, G6, B29, and C3, all from NNK library, were identified as high affinity binders. And after the 5^{th} round sorting, the whole library was dominated by G6 clone. Interestingly, B20, which came from NVT library, was found by solution-binding sorting alone. This suggested that more clones can be found by different strategies of sorting methods, which may bias for different clones. With different library designs, more VEGF binding clones with distinct sequences should be identified also. The four unique clones with distinct sequences were first characterized for their binding affinity to murine and human VEGF using competition-binding ELISA at 25° C. IC50 data from phage binding assays represent an estimation of their affinities, and G6 was identified as the highest affinity binder with IC50 at 0.5-1 nM for both human and murine VEGF (FIG. 2).

[0289] (b) Activities and Properties

[0290] A series of in vitro assays were conducted to examine properties and activities of the selected novel anti-VEGF antibodies.

Epitope Blocking Assay

[0291] First, the antibody phage clones were examined for their possible binding epitopes on VEGF. A phage-blocking assay was used, wherein the bindings of the phage clones (at constant concentration) to mVEGF-coated wells were measured in the presence of either a full extracellular domain (ECD) of KDR or a second domain of Flt-1 (Flt-1_{D2}), both at increasing concentrations, respectively. Full ECD of KDR or Flt-1 has seven immunoglobulin-like domains, and binds VEGF through the second and third domain. The second domain of Flt-1 alone can bind VEGF at Kd of 2 nM with known epitopes on VEGF, based on the published crystal structure the VEGF-VEGFR complex (Wiesmann et al. (1997) Cell 91:695-704). The Kd of KDR ECD binding to VEGF is about 5 nM. We expected that the bindings of the phage clones to be reduced with the increasing addition of receptors, if the epitopes for an antibody on phage overlap significantly with receptor.

[0292] For receptor blocking assay at protein level with purified Fab expressed from E. coli, (mouse or human VEGF), VEGF receptor immobilized plate by coating baculovirus expressed Flt-1 ECD fragment (Ig domain 1-5) (Flt-1_{D1-5}) directly, or 293 cell-expressed KDR-Ig fusion, which present KDR ECD (Ig domain 1-7) as Fcγ fusion captured with goat anti-human IgG Fcγ (Jackson ImmunoResearch Lab. West Grove, Pa.) coated on the 96-well Maxisorp immunoplate and blocked with 0.5% BSA and 0.02% Tween20. Biotinylated bacterially expressed hVEGF or mVEGF at 0.2 nM was first incubated with three-fold serial diluted anti-VEGF Fabs, G6, Fab-12 (the Fab of the Avastin™ antibody), or Y0317 in PBS with 0.05% Tween 20 (PBST). After 1 h incubation at room temperature, the mixtures were transferred to a VEGF receptor immobilized plate and incubated for 10 min. The VEGF-A that was not blocked by anti-VEGF was captured with VEGF receptor coated wells and detected by streptavidin-HRP conjugate and developed with TMB substrate as described above.

[0293] As shown in FIG. 3, the four clones were blocked to different extents by Flt-1_{D2} and KDR. The results of the blocking assay suggested that these four clones might have different binding epitopes on VEGF that are nonetheless overlapped with receptor binding epitope. The affinities of the antibody clones did not correlate with the efficiency of blocking by receptor in this blocking assay. Y0959, a phage clone with known epitope was used as a control. Among the four novel clones, G6 and B20 appeared to have epitopes that sufficiently overlapped with those for both Flt-1 and KDR, since their bindings to mVEGF was significantly reduced in the presence of the receptor fragments. The difference in the blocking efficient is small but has been consistent with multiple assays. One prediction is that G6 or B20 has epitopes that matches with those of receptor on VEGF much better than Fab-12 or its variants, Y0317 and Y0959 (Muller, Y. A., et al., (1998) Structure 6:1153-1167). Therefore, we proceeded to generate Fab protein to confirm the binding and examine the epitope. G6 was chosen first for further study since it has the highest affinity against both mVEGF and hVEGF.

Binding Specificity and Neutralizing Activity

[0294] To determine the binding specificity of G6 Fab clone, ELSA assays were conducted using human, mouse, rat and rabbit VEGF-A₁₆₅ as well as VEGF homologs including mouse and human placenta growth factor (PIGF-2), mVEGF-D and human VEGF-B. Human and murine placental growth factor (PIGF-2), murine VEGF-D, rat VEGF-A and human VEGF-B were from R&D system. The tested antigens were coated on NUNC 96-well Maxisorp immunoplate at the concentration of 2 ug/ml. Binding with increasing concentrations of G6 Fab protein was measured by Protein G-horse radish peroxidase conjugate and substrate. For example, Fab protein was prepared from E. coli harboring the plasmid of G6 Fab expression construct under the promoter of alkaline phosphatase and secretion leader sequences still and purified with Protein G affinity column. G6 Fab binding to VEGF and its homologs were measured by direct ELISA. VEGF homolog-coated wells (at 2 ug/ml in PBS concentration) were blocked with 0.5% BSA and 0.05% Tween20 at 25° C. Fab at increasing concentrations were incubated with the VEGF homolog-coated wells for 1 h at 25° C. and measured with anti-human Fab antibody horse radish peroxidase conjugate diluted in PBT buffer, then developed with TMB substrate. Solution binding assays were also carried out for some proteins by incubating 0.5 nM of G6 Fab with increasing concentrations of a VEGF homolog for 1-2 h at 25° C., and the unbound Fab was captured with mVEGF-A coated wells and measured. As shown in FIG. 4, the G6 Fab protein binds equally well to both mVEGF and hVEGF (approximately 0.6 nM and 1.4 nM, respectively). Moreover, the G6 antibody did not bind to other VEGF homologs at all, and thus is highly specific to VEGF. The G6 Fab bound rat and rabbit VEGF with similar affinity as for mVEGF (data not shown).

[0295] To test if G6 not only binds to VEGF at high affinity, but also is capable of effectively blocking VEGF's binding to VEGF receptors, blocking assays were conducted, wherein either hVEGF or mVEGF was tested for its binding to KDR in the presence of increasing concentrations of the G6 Fab clone. Also used as control were the two anti-hVEGF antibodies, Fab-12 (the Fab of Avastin™) and Y0317, that are capable of effectively blocking hVEGF but neither bind to mVEGF nor block its activities. As shown in FIG. 5, G6 effectively blocked hVEGF's binding to KDR with an efficacy similar to that of Fab-12 or Y0317. Furthermore, G6 can also significantly block mVEGF's binding to KDR. In comparison, neither Fab-12 nor Y0317 showed any blocking effect on mVEGF.

[0296] Thus, the novel anti-VEGF antibody G6 of this invention is a high affinity anti-VEGF antibody capable of binding and blocking VEGF from both human and murine species.

Cell-Based Assay

[0297] To further determine binding specificity and blocking activities of the novel antibody G6, a cell-based assay using human umbilical vein endothelial cells (HUVECs) was conducted, wherein various anti-VEGF antibodies were tested for their abilities to block either human or murine VEGF induced cell proliferation. Basically, 96-well tissue culture plates were seeded with 3000 HuVECs per well and fasted in the assay medium (F12:DMEM 50:50 supplemented with 1.5% (v/v) diafiltered fetal bovine serum) for 24 hours. The concentration of VEGF used for stimulating the growth of cells was determined by first titrating to identify the amount of VEGF that can induce 90% of maximal DNA synthesis. Fresh assay medium with fixed amounts of VEGF (0.1 nM final concentration) and increasing concentrations of anti-VEGF Fab were then added. After 24 hours of incubation, cells were pulsed with 0.5 μCi per well of [³H] thymidine for 24 hours, and then harvested on to 96-well filter plate for counting by a TopCount gamma counter. Here the DNA synthesis was measured by incorporation of tritiated thymidine. In this assay, the anti-VEGF antibodies serving as the control were Fab-12 and Y0317.

[0298] As shown in FIG. 6, G6 antibody significantly reduced both hVEGF and mVEGF's abilities to promote HUVEC proliferation. The basic fibroblast growth factor (bFGF) experiment here served as a control to demonstrate that none of the anti-VEGF Fabs used in this assay had any non-specific toxicity to the host cells.

[0299] (c) Affinity Improvement of the G6 and B20 Anti-VEGF Antibodies

[0300] Two novel antibody clones, G6 and B20, were chosen for further improvement on binding affinities. To improve affinity, several selected residues of the light chain CDR were randomized, since both clones came from a library with only randomized heavy chain and a fixed light chain. Surface exposed CDR residues and residues that are highly diverse in the Kabat database of natural antibody sequences were chosen. Site-directed mutagenesis was used with tailored degenerate codons to generate amino acid diversity that mimicked the natural immune repertoire at each CDR site on light chain (FIG. 7). Sorting was first performed by adding the library on immobilized hVEGF or mVEGF on the Maxisorp 96-well plate to maximize the recovery of binders, followed by solution sorting with decreasing concentration of biotinylated hVEGF or mVEGF as two separate tracks of selection. Concentration of biotinylated VEGF was selected based on the initial affinity of the clone to gauge the pressure of the sorting. The selection pressure was also increased by incubating phage binders with 1000 fold excess of un-biotinylated antigen in solution for different length of time at different temperature after initial incubation of the phage library with biotinylated VEGF and before capturing by neutravidin coated on 96-well Maxisorp plate.

[0301] As an example of the above-described processes, G6 having 1 nM affinity was subject to further affinity improvement. The first round of sorting used solid-supported method to capture all clones that still bound VEGF, and then at the second round of sorting, the phage library was incubated with 1 nM of VEGF. Next, the solution-binding used 1 nM biotinylated hVEGF to select most binders. Before capturing, 1 uM unbiotinylated hVEGF was added and incubated at RT for 15 min to compete off fast off-rate binders. Then in the following rounds of sorting (3^{rd} and 4^{th}), more selection pressure was put into solution sorting by using less biotinylated hVEGF (0.1 nM) to select and 100 nM unbiotinylated hVEGF at 37C for 30 min or longer time (2 hr or 6 hr) to compete off high off-rate binders and fish for low off-rate binders.

[0302] The same strategy was utilized to improve B20 clone, except that less stringent condition was used because of its low affinity against hVEGF (IC50˜150 nM). The mVEGF selection track followed the same procedures and conditions as what were used with hVEGF. Enrichment was calculated by the eluted phage titers ratio to selection without biotinylated target. After sorting, high throughput single-spot competition binding ELISA as described above was used to quickly screen for improved affinity clones.

[0303] In this assay, low amount of hVEGF or mVEGF (10 nM) was applied to screen 51 clones from G6-based phage library and 110 clones from B20-based phage library with the control of wild type G6 and B20 binders. Several improved G6 clones, collectively termed G6-II variants, were selected out and showed remarkably increased binding affinity to both human and murine VEGF by over one hundred fold by comparing the phage IC50 values with wild-type clones (FIG. 7). Clones with many unique sequences were found that have improved affinity, which suggested that there are many light chains that can accommodate the heavy chain of the selected clones. It is also interesting to note that binding specificities of some clones were changed. This suggests that light chain is able to modulate the interaction of heavy chain with its antigen sufficiently to alter its specificities. As for the clone sequences, most G6-II clones were different from G6 only in their third light chain CDR (CDR-L3).

[0304] To generate Fab protein or IgG protein for affinity and activity assays, we cloned the variable region into a Fab expression plasmid for expression in an E. coli or a mammalian cell (a phagemid vector that had been modified by deleting the sequence encoding the C-terminal domain of phage coat protein p3 and adding a termination sequence for ribosome binding about 20 nucleotides downstream from the stop codon at the end of heavy chain first constant domain). Fab protein was generated by growing transformed 34B8 E. coli cells in AP5 media at 30° C. for 24 h as described (Presta, L et al., (1997) Cancer Res 57:4593-4599). IgG was purified with Protein A columns and Fab was purified with Protein G affinity chromatography. The production yield for Fab was typically 5-10 mg/L in small scale shake flask growth and 0.5-3 g/L in fermenter growth. IgG production was reasonably high at 10-50 mg/L small scale culture with some clone to clone differences.

[0305] Three G6-II improved clones, G6-8, G6-23 and G6-31 (see FIG. 7 for residue changes in light chain CDRs), were selected to make into Fab protein for affinity measurement, epitope mapping by receptor blocking assay, and activity study in HuVEC growth inhibition assay. For affinity determinations of anti-mVEGF Fabs, we used surface plasmon resonance assays on a BIAcore™-2000 or a BIAcore™-3000 (BIAcore, Inc., Piscataway, N.J.) at 25° C. and 37° C. with immobilized mVEGF or hVEGF CM5 chips at ˜100 response units (RU) as described (Chen, Y., et al., (1999) J. Mol Biol 293:865-881). Briefly, carboxymethylated dextran biosensor chips (CM5, BIAcore Inc.) were activated with N-ethyl-N-(3-dimethylaminopropyl)-carbodiimide hydrochloride (EDC) and N-hydroxysuccinimide (NHS) according to the supplier's instructions. Human or murine VEGF was diluted with 10 mM sodium acetate, pH 4.8, into 5 ug/ml (˜0.2 uM) before injected at a flow rate of 5 ul/minute to achieve approximately 100 response units (RU) of coupled protein. Following the injection of 1 M ethanolamine to block unreacted groups. For kinetics measurements, two-fold serial dilutions of Fab (100 to 0.78 nM or 3 nM to 500 nM) were injected in PBS with 0.05% Tween 20 (PBST) at 25° C. at a flow rate of approximately 25 ul/min. Association rates (kₒₙ) and dissociation rates (k_{off}) were calculated using a simple one-to-one Langmuir binding model (BIAcore Evaluation Software version 3.2) by simultaneous fitting the association and dissociation sensorgram. The equilibrium dissociation constant (Kd) was calculated as the ratio k_{off}/kₒₙ.

[0306] Since the kₒₙ of affinity improved G6 variants did not result in satisfactory statistics with the available binding model in BIAcore evaluation methods, solution competition binding assays using phage-displayed proteins were also carried out to measure the relative affinity of those antibodies at equilibrium. VEGF displayed on phage were incubated with serial dilutions of Fab at room temperature for 20 h to reach equilibrium and the unbound VEGF-phage were captured with G6 Fab briefly (10 min) and measured with anti-M13-HRP and substrate TMB as above. A second format of solution competition binding assay was also carried out where Fab was displayed on phage and interact with dilutions of VEGF to reach equilibrium (20 h) and unbound Fab were captured on VEGF coated 96-well plate and measured as above. The two IC50s values were averaged to get binding affinities as final ICSOs. Binding of Fabs to mVEGF were assayed only with second format due to the lack of the reagent of mVEGF displaying phage.

[0307] From initial SPR experiments, it was noted that there was significant kₒₙ improvement. For example, we found that G6-23 had the most significant improvement in on-rate at 25° C. and 37° C. against both human and murine VEGF, and small reduction in off-rate (FIG. 8). The kₒₙ for G6-31 improved as compared to G6 as well (data not shown). Further, the solution competition binding assays confirmed that G6-23 was the most affinity-improved clone with its high affinity of IC50 of 20 pM against hVEGF and mVEGF (FIG. 7).

[0308] Fluorescent quenching assays were also performed to determine the kₒₙ rates of the higher affinity G6 series antibodies. Therefore, three of the affinity matured Fabs (G6-8, G6-23 and G6-31) were purified as Fab proteins, and their affinities for mVEGF were compared to G6 by using and fluorescence quenching in solution for the rate of association (on rate, kₒₙ) (Table 1 and FIGS. 30A and B).

TABLE 1

| | Affinity | | |
|---|---|---|---|
| Clone | kₒₙ (10⁵ M⁻¹ S⁻¹) | K_{off} (10⁻⁴ S⁻¹) | Kd (nM) |
| G6 | 1.75 (1.93) | 1.6 | 0.91 |
| G6-23 | 56.6 | 1.21 | 0.021 |
| G6-31 | 21.6 | 0.35 | 0.016 |
| G6-8 | 16.8 | 1.29 | 0.077 |

[0309] The fluorescence quenching assays were performed as follows. The change of fluorescence intensity in complexing the Fab and VEGF was used to determine the rate of association as developed for the on-rate determination of Fab-12 variants and VEGF (Marvin J. S. and H. B. Loman (2003) Biochemistry 42:7077-7083). We first determined that the fluorescence intensity with an excitation wavelength of 280 nm of G6 (or variants)-VEGF complex was lower than the sum of individual components using an 8000-series SLM-Aminco spectrophometer (Thermo-Spectronic) by adding 100 nM VEGF to a stirred cuvette containing 20 nM Fab in PBS, pH 7.2, at 25° C. Next, increasing concentrations of VEGF (100-400 nM) was mixed with equal volumes of 40 nM Fab in a stop-flow (Aviv Instruments) equipped spectrophometer to observe the rate of the decrease of fluorescence intensity at 25C. For each experiment, nine measurements were performed for each concentration and fitted to a single-exponential curve. The observed rate was then plotted against VEGF concentrations for pseudo-first order analysis, and the slope is the rate of association. Two to three independent experiments were carried out and the differences were within 50%.

[0310] The estimated kₒₙ of the improved clones from the SPR method were ˜3-6-fold lower than the measurements by solution-based fluorescence quenching assay, whereas kₒₙ measurements for parent G6 Fab from SPR was statistically sound and within 1.2-fold difference with fluorescence quenching assays. It is possible that using BIAcore SPR technology for fast on-rate measurements was limited by the complex flow dynamics, or there could be some differences in protein behaviors between the parent clone and affinity-improved clones, though aggregation problems were not observed with these proteins. Based on the fluorescence assays, the three Fabs exhibited improvements over G6 in the on-rate by 6, 8 or 20-fold for G6-8, G6-31 or G6-23, respectively. Fab-G6-31 also exhibited an ˜4-fold improvement in the off-rate, and as a result, the affinity of Fab-G6-31 (K_{d}=16 pM) and Fab-G6-23 (K_{d}=21 pM) was ˜40-60-fold improved compared to the G6 parent (K_{d}=910 pM). It was consistent with the solution phase competition assays, which showed a 20-60-fold improvement in IC₅₀ value for G6-31 (30 pM) or G6-23 (10 pM) in comparison with G6 (0.67 nM). We applied the light chain affinity maturation strategy to five other heavy chain sequences and have observed 10- to 30-fold improvements in binding affinities (data not shown). Unlike G6, many improved clones adopted new sequences for all three light chain CDRs. Thus, we found that the three G6 variants increased binding affinity to both human and murine VEGF over G6, predominantly by the increase in the rate of association (on rate or kₒₙ). G6-23 had the highest on rate and then followed by G6-8 and then G6-31. The improvement in the rate of dissociation (off rate or k_{off}) was 2-3 fold for G6-23, and 8 or 13-fold for G6-31 for hVEGF or mVEGF, respectively. Compared to Fab-12 and Y0317, G6 and G6-23 had significantly different binding kinetics (FIG. 32). G6-23 had similar Kd as Y0317 but a faster kinetics with fast on rate of over 10⁶ (M⁻¹s⁻¹), and moderate rate of dissociation (off rate or k_{off}) at 1-2×10⁴ s⁻¹, whereas Y0317 has slow kₒₙ at 3×10⁴ M⁻s⁻¹, and very slow k_{off} at ˜5×10⁶ s⁻¹ (FIG. 32).

[0311] The solution competition binding assay used biotinylated protein antigens equilibrated with serial dilutions of purified Fab or IgG proteins, and the unbound biotin-antigen was captured with immobilized Fab or IgG coated on Maxisorb plates and was detected with streptavidin conjugated HRP. Alternatively Fab or IgG proteins were equilibrated with serial dilutions of protein antigen, and the unbound Fab or IgG was captured with immobilized antigen and detected with protein A-HRP.

[0312] For the VEGF receptor blocking assay using purified Fab, VEGF receptor was immobilized on a plate by coating Flt-1 ECD fragment (Ig domain1-5) (Flt-1_{D1-5}) directly, or by first coating with goat anti-human IgG Fcγ (Jackson ImmunoResearch Lab. West Grove, Pa.) and then treating with KDR-IgG fusion receptor which presented KDR ECD (Ig domain 1-7) as a dimer, on a 96-well Maxisorp immunoplate. The plate was then blocked with 0.5% BSA and 0.02% Tween20. Sub-nanomolar concentrations of biotinylated hVEGF or mVEGF at 0.2 nM were incubated with three-fold serial diluted anti-VEGF Fabs, G6, G6-11 (G6-8,23, and 31), Fab-12, or Y0317 in PBST. After 1 h incubation at room temperature, the mixtures were transferred to the plate containing immobilized VEGF receptor and incubated for 10 min. The VEGF-A that was not blocked by anti-VEGF was captured with VEGF receptor coated wells and detected by streptavidin-HRP conjugate and developed with TMB substrate as described above. The results showed that, compared to the original G6, the selected G6-II Fabs indeed have increased blocking activities for both hVEGF and mVEGF. Strong blocking had been observed with both G6 and B20 phage display clones which suggested that their binding epitopes on VEGF overlapped with the epitopes for receptors. G6 Fab was also shown to block the binding of both human and murine VEGF to Flt-1 ECD (FIG. 31) efficiently. In comparison, Fab-12 can only block hVEGF but not mVEGF binding to receptor, consistent with binding specificities. An Fab-12 variant with improved affinity for hVEGF (Kd=20 pM), Y0317, inadvertently acquired some weak affinity to mVEGF (Kd ˜300 nM at 25 C, Y. Chen and H. Lowman unpublished results) and show a slight receptor blocking activity to mVEGF at high concentrations.

[0313] Inhibition of VEGF activity in the endothelial cell growth assay (HuVEC) was performed as described above. Like G6, G6-II specifically inhibited the growth of human umbilical vein endothelial cell stimulated by human and murine VEGF, but not the growth stimulated by human basic fibroblast growth factor (bFGF). The concentration required to inhibit 50% of the growth of the cells stimulated by both human and murine VEGF (HuVEC IC50) correlated well with the affinity measured by BIAcore or solution binding ELISA assay at 37° C. Compared with G6, G6-23 and G6-31 showed at least 100 fold improvement in inhibiting HuVECs growth stimulated by hVEGF or mVEGF. Fab-12 and Y0317 Fabs were also measured in the same assays to serve as controls. Fab-12 showed no measurable binding to mVEGF, whereas Y0317 Fab could bind mVEGF at 350 nM affinity. Therefore, as expected, Y0317 and Fab-12 did not show any inhibitory effects on mVEGF mediated HUVEC growth. We showed that many G6-11 variants with different light chain can have improved affinity and the solution-binding assay can also predict the outcome of the potency as inhibitor in HuVEC cell assay.

[0314] VEGF bindings of G6-23 were compared with that of G6 as well as Fab-12. As shown in FIG. 8, G6-23 has significantly improved on-rate for binding to both hVEGF and mVEGF. While the off-rate of G6-23 is substantially similar to that of G6, the overall Kd of G6-23 is at least about 7 fold better than that of G6 for both hVEGF and mVEGF.

### Example 2

### Mapping of VEGF Binding Sites on G6 and G6-23 Antibodies

Functional mapping of G6 and G6-23 by Shotgun Alanine and Homolog Scanning

[0315] Functional mapping of G6 and G6-23 by shotgun alanine and homolog scanning were performed to identify residues that are important for binding hVEGF and finding residues that can be improved further for binding VEGF. We generated combinatorial phage libraries which allowed heavy chain or light chain CDR residues in separate libraries to be either alanine or wild type (alanine scanning), or either homologous amino acid or wild type (homolog scanning).

Mutagenic Oligonucleotides for Shotgun Scanning Libraries

[0316] The following mutagenic oligonucleotides for shotgun alanine (A)- and homolog (H)-scan library constructions to randomize CDR residues in G6 and G6-23 antibodies were designed using previously described shotgun codons (Vajdos et al. (2002) J. Mol Biol 320:415-428). Equimolar DNA degeneracies are represented in the IUB code (K=G/T, M=A/C, R=A/G, S=G/C, V=A/C/G, W=A/T, Y=C/T), and the degenerate codons are shown in bold text. All the following oligonucleotides were generated by Genentech DNA synthesis group.

| | |
|---|---|
| Oligo | Sequence |

| | | |
|---|---|---|
| H1-A | GCA GCT TCT GGC TTC ACC ATT | (SEQ ID NO: 3) |
| | KCC GMT KMT KSG ATA CAC TGG | |
| | GTG CGT CAG | |
| H2-A | AAG GGC CTG GAA TGG GTT GCA | (SEQ ID NO: 4) |
| | GST ATT RCT CCT GST GST GGT | |
| | KMT ACT KMT TAT GCC GAT AGC | |
| | GTC AAG GGC | |
| H3-A | ACT GCC GTC TAT TAT TGT GCA | (SEQ ID NO: 5) |
| | CGC KYT GYT KYT KYT SYT SCA | |
| | KMT GCT ATG GAC TAC TGG GGT | |
| | CAA | |
| L1-A | ACC TGC CGT GCC AGT SMA GMT | (SEQ ID NO: 6) |
| | GYT KCC RCT GST GTA GCC TGG | |
| | TAT CAA CAG AAA C | |
| L2-A | CCG AAG CTT CTG ATT KMT KCC | (SEQ ID NO: 7) |
| | GCA TCC KYT CTC KMT TCT GGA | |
| | GTC CCT TCT CGC | |
| L3-A1 | GCA ACT TAT TAC TGT SMA CAA | (SEQ ID NO: 8) |
| | KCC KMT RCT RCT CCT SCA ACG | |
| | TTC GGA CAG GGT ACC | |
| L3-A2 | GCA ACT TAT TAC TGT RMA CAA | (SEQ ID NO: 9) |
| | GST KMT GST RMC CCT KSG ACG | |
| | TTC GGA CAG GGT ACC | |
| H1-H | GCA GCT TCT GGC TTC ACC ATT | (SEQ ID NO: 10) |
| | KCC GAM TWC YKG ATA CAC TGG | |
| | GTG CGT CAG | |
| H2-H | AAG GGC CTG GAA TGG GTT GCA | (SEQ ID NO: 11) |
| | GST RTT ASC SCA KCT GST GST | |
| | TWC ASC TWC TAT GCC GAT AGC | |
| | GTC AAG GGC | |
| H3-H | ACT GCC GTC TAT TAT TGT GCA | (SEQ ID NO: 12) |
| | CGC TWC RTT TWC TWC MTC SCA | |
| | TWC GCT ATG GAC TAC TGG GGT | |
| | CAA | |
| L1-H | ACC TGC CGT GCC AGT SAA GAM | (SEQ ID NO: 13) |
| | RTT KCC ASC KCT GTA GCC TGG | |
| | TAT CAA CAG AAA C | |
| L2-H | CCG AAG CTT CTG ATT TWC KCC | (SEQ ID NO: 14) |
| | GCA TCC TWC CTC TWC TCT GGA | |
| | GTC CCT TCT CGC | |
| L3-H1 | GCA ACT TAT TAC TGT VAR VAR | (SEQ ID NO: 15) |
| | KCC TWC ASC ASC CCT SCA ACG | |
| | TTC GGA CAG GGT ACC | |
| L3-H2 | GCA ACT TAT TAC TGT VAR VAR | (SEQ ID NO: 16) |
| | GST TWC KCT RAC CCT TKG ACG | |
| | TTC GGA CAG GGT ACC | |

Phagemid Template Vectors for Shotgun Scanning Library Constructions

[0317] (A) Phagemid pV350-2b

[0318] Phagemid pV0350-2b, which was previously used to display h4D5 Fab, a humanized antibody against the extracellular domain (ECD) of EGF-related binding receptor 2 (ErbB2), monovalently on the surface of M13 bacteriophage and contained stop codon (TAA) in all three CDR in heavy chain (hc), served as the template for G6 heavy chain shotgun-scan library construction.

[0319] More specifically, the phagemid pV0350-2b was derived from the pS0643 phagemid. The phagemid vector, pS0643 (also known as phGHam-g3, e.g., U.S. Pat. No. 5,688,666, Example 8), contains pBR322 and fl origins of replication, an ampicillin resistant gene, an E. coli alkaline phosphatase (phoA) promoter (Bass et al., (1990) Proteins 8:309-314), and a sequence encoding a stII secretion signal sequence fused to residues 1-191 of human growth hormone (hGH) and a sequence encoding the C-terminal residues 267-421 of protein III of M13 phage (hereinafter, cP3 or pIII). The pS0643 phagemid also contains an XbaI site and an amber stop codon following residue 191 of hGH. The stII secretion signal sequence can export a protein to the periplasm of a bacteria cell (e.g., a light chain region (LC) of an antibody). The sequence encoding the human growth hormone (hGH) was removed from the pS0643 vector and replaced with a NsiI/XbaI nucleic acid fragment encoding a humanized anti-Her2 Fab fragment (“h4D5” sequence) ligated in frame with the stII secretion signal (humAb4D5-8, see Carter et al., (1992) PNAS 89:4285-4289 therein or U.S. Pat. No. 5,821,337, for sequence). The amber stop codon between the heavy chain fragment and cP3 was deleted, as this modification has been shown to increase the levels of Fab displayed on phage.

[0320] The h4D5 antibody is a humanized antibody that specifically recognizes a cancer-associated antigen known as Her-2 (erbB2). The h4d5 sequence was obtained by polymerase chain reaction using the humAb4D5 version 8 (“humAb4D5-8”) sequence and primers engineered to give rise to a 5′ NsiI site and a 3′ XbaI site in the PCR product (Carter et al., (1992) PNAS 89:4285-4289). The PCR product was cleaved with NsiI and XbaI and ligated into the pS0643 phagemid vector. The h4D5 nucleic sequence encodes modified CDR regions from a mouse monoclonal antibody specific for Her-2 in a mostly human consensus sequence Fab framework. Specifically, the sequence contains a kappa light chain (LC region) upstream of VH and CH1 domains (HC region). The method of making the anti-Her-2 antibody and the identity of the variable domain sequences are provided in U.S. Pat. Nos. 5,821,337 and 6,054,297. The pS0643 plasmid containing humanized 4D5 (version 8) was still further modified. For example, a herpes simplex virus type I glycoprotein D epitope tag (gD tag—MADPNRFRGKDLGG (SEQ ID NO:17)) was added in frame to the c-terminus of the LC using site-directed mutagenesis. Following the stop codon downstream of the LC, a ribosome binding site and nuclec acid molecule encoding a stII signal sequence were ligated to the N-terminus of the HC sequence. Consequently, the HC sequence is in frame with the C-terminal domain of the p3 (cP3), a minor coat protein of M13 phage. Thus, a Fab displayed on phage can be produced from one construct. This Fab phagemid vector is referred to as pV0350-2b and is be schematically illustrated in FIG. 1. The light gene in pV0350-2b was further modified by mutating a few other amino acid residues, e.g., Arg66 to a Gly and S93 to Ala.

[0321] To generate F(ab)′2 displayed on phage, the PV0350-4 vector was further modified by inserting a dimerizable leucine zipper GCN4 sequence (GRMKQLEDKVEELLSKNYHLENEVARLKKLVGERG) (SEQ ID NO: 18) between the HC and cP3 sequences by cassette mutagenesis. The GCN4 leucine zipper brings two sets of LC/HC-cP3 fusion polypeptides together in the E. coli periplasm and presents the dimer on the surface of phage. This F(ab)′2 phagemid vector is referred to as pV0350-4 is also schematically illustrated in FIG. 1.

[0322] For G6-23 heavy chain shotgun-scan library construction, phagemid pW0448-2 was constructed by introducing G6-23 CDRL3 sequence into pV0350-2b phagemid using Kunkel mutagenesis method (Kunkel et al., (1991) Methods Enzymol 204:125-139)). Phagemid pW0448-1 was also generated from pV0350-2b as template for G6 and G6-23 light chain shotgun-scanning library that contains the heavy chain variable domain of G6 and stop codon (TAA) in all three CDRs in light chain.

Construction of Shotgun Scanning Libraries

[0323] Phage-displayed libraries were constructed using Kunkel mutagenesis method as described (Kunkel et al., 1991, supra). In total, eight libraries were generated: hcA-G6, hcA-G6.23, lcA-G6 and lcA-G6.23 were alanine scanning libraries of heavy chain (hc) or light chain (lc) of G6 and G6-23; hcH-G6, hcH-G6.23, lcH-G6, lcH-G6.23 were homolog scanning libraries. The template containing TAA stop codon within all three heavy or light chain CDRs was simultaneously repaired during the mutagenesis reaction by the above mutagenic oligonucleotides with designed degenerate codons. After mutagenesis, 10 ug of DNA were electroporated into E. coli SS320 cells (˜10¹¹ cells) (Sidhu et al., (2000) Methods Enzymol 328:333-363), which were grown overnight at 30° C. in 2YT broth supplemented with M13-KO7 helper phage (New England Biolabs), 50 ug/ml carbenicillin and kanamycin. Library sizes were 2-5×10⁹. Phage were concentrated from the culture media by precipitation with PEG/NaCl and resuspended in phosphate-buffered saline (PBS) as described previously (Sidhu et al., 2000, supra).

Library Sorting and Screening Assays

[0324] Protein target, VEGF or anti-gD tag antibody (provided by Genentech research groups), was immobilized on NUNC (Roskilde, Denmark) 96-well Maxisorp immunoplates overnight at 4° C., and before sorting, the plates were blocked with bovine serum albumin (BSA, Sigma) for 2 hour at room temperature (RT). Phage libraries from the above preparation (˜10¹³ phage/ml) were incubated in the target-coated immunoplates for 1 h at RT to allow for phage binding. Plates were then washed 15 times with PBS and 0.05% Tween 20 (PST) buffer, and bound phage were eluted with 0.1 M HCl for 15 minutes and neutralized with 1.0 M Tris base. Eluted phage were propagated in E. coli XLI-blue (Stratagene) for next round of selection.

[0325] Individual clones selected from the second round of panning were grown in a 96-well plate overnight at 37° C. with 150 ul of 2YT broth supplemented with 50 ug/ml carbenicillin and M13-VCS helper phage (1:2500)(Stratagene). The culture supernatants were directly used in phage competitive enzyme-linked immuno-absorbant assays (phage ELISAs) to screen functional phage-displayed G6 or G6-23 Fab variants binding to target proteins coated on the plate (Sidhu et al., 2000, supra). The clones exhibited both positive phage ELISA signals to VEGF antigen and anti-gD tag antibody were subjected to DNA sequence analysis.

DNA Sequencing and Analysis

[0326] The functional clones from the above screening were grown in 96-well plates with 100 ul of 2YT broth and 50 ug/ml carbenicillin at 37° C. for 2 hour. Little amount of culture supernatants (1˜2 ul) was served as templates for PCRs (GeneAmp® PCR System 9700, Applied Biosystems) to amplify the phagemid DNA fragments containing the light and heavy chain genes with sequencing primers to add M13 (−21) universal sequences at the 5′ end of the amplified fragments, thus facilitating the use of M13 forward primers in sequencing reactions. Amplified DNA fragments in a 96-well format were sequenced using Big-Dye terminator sequencing reactions and analyzed on an ABI Prism 3700 96-capillary DNA analyzer (PE Biosystems, Foster City, Calif.) by Genentech DNA sequencing group. The sequences were analyzed with the program SGCOUNT as described previously (Weiss et al., (2000) PNAS USA 97:8950-8954).

[0327] The following number of functional clones in parenthesis selected from each library against VEGF antigen was subjected to DNA sequence analysis: hcA-G6 (107), hcA-G6-23 (124), lcA-G6 (111), lcA-G6-23 (102), hcH-G6 (111), hcH-G6-23 (135), lcH-G6 (106), lcH-G6-23 (97). For the clones from anti-gD tag antibody binding selection: hcA-G6 (108), hcA-G6-23 (130), lcA-G6 (116), lcA-G6-23 (98), hcH-G6 (120), hcH-G6-23 (122), lcH-G6 (111), lcH-G6-23 (102).

Fab G6 and G6-23 Point Mutants and Affinity Measurements

[0328] To generate G6 and G6-23 Fab mutants for affinity measurements, we used previously modified Fab expression plasmid from phage-displayed vector with an E. coli alkaline phosphatase (phoA) promoter (Presta et al., (1997) Cancer Res 57:4593-4599). Each point mutant was constructed using the Kunkel site-directed mutagenesis method (Kunkel et al., 1991, supra) with oligonucleotides designed to have point mutation within CDRs. For mutant productions, expression plasmids were transformed into 34B8 E. coli cells, and single colony was picked and grown in complete C.R.A.P. medium (Presta et al., 1997, supra) supplemented with 25 ug/ml carbenicillin at 30° C. for 24 h. The expressed recombinant proteins were purified through a Protein G high trap column (Amersham Pharmacia) and quantitated by UV absorption at 280 nm (Presta et al., 1997, supra). The binding affinities of G6 and G6-23 Fab mutants were evaluated using competitive solution binding ELISA with hVEGF displaying phage as described. The fold reduction in wild-type VEGF phage binding activity due to each point mutation was determined by dividing the IC₅₀ for the G6 or G6-23 point mutant by the IC₅₀ for wild-type G6 or G6-23 Fab respectively.

BIACORE™ Binding Analysis for FabG6 and G6-23 Variants

[0329] For binding kinetics, surface plasmon resonance (SRP) measurement with a BIAcore™-3000 (BIAcore, Inc., Piscataway, N.J.) was used as previously described (Karlsson & Falt, (1997) J. Immunol Methods 200:121-133). Carboxymethylated dextran biosensor chips (CM5, BIAcore Inc.) were activated with N-ethyl-N′-(3-dimethylaminopropyl)-carbodiimide hydrochloride (EDC) and N-hydroxysuccinimide (NHS) according to the supplier's instructions. Human VEGF (hVEGF) was diluted with 10 mM sodium acetate, pH 4.8, into 5 ug/ml (˜0.2 uM) before injected at a flow rate of 5 ul/minute to achieve approximately 100 response units (RU) of coupled protein. Following by the injection of 1 M ethanolamine to block unreacted groups. For kinetics measurements, two-fold serial dilutions of G6 or G6-23 Fab variants (0.7 nM to 100 nM) were injected in PBS with 0.05% Tween 20 (PBST) at 25° C. at a flow rate of 25 ul/min. Association rates (kₒₙ) and dissociation rates (k_{off}) were calculated using a simple one-to-one Langmuir binding model (BIAcore™ Evaluation Software version 3.2). The equilibrium dissociation constant (Kd) was calculated as the ratio k_{off}/kₒₙ. Based on the selection of the phage library, two resides in heavy chain CDR2 appeared to prefer to be alanine or homologous amino acid: HC-Y58 preferred to be alanine, HC-151 preferred to be valine for binding VEGF. We therefore generated mutant protein Fab with single mutation to confirm the finding from phage libraries. The top graph in FIG. 9 shows that the BIAcore analysis of mutation G6-23-Y58A (G6-23.1) (50 nM) binding to human VEGF coated chip improved the binding on-rate compared to G6-23, which already had a much improved on-rate compared to G6. The lower graph showed the BIAcore analysis of mutant G6-Y58A (G6-1) or G6-I51 V (G6-2) to VEGF coated chip. Both had improved on-rate compared to G6. In fact, the double mutant (Y58A/I51V) had an additive effect on the on-rate improvement for G6 and G6-23.

Results of Shotgun Scanning of G6 and G6-23

[0330] The results of both shotgun scanning on G6 and G6-23 antibodies indicated that heavy chain CDR side-chains dominated the binding interactions with hVEGF. When mapped onto the X-ray crystal structure of G6 Fab, the functionally important residues in combination represent a portion of the structural epitope, which is defined by the residues in direct contact with hVEGF. The shotgun alanine-scan results revealed the functional epitope comprising the solvent-exposed ridge, which was composed of residues Y32, W33, G54, V96, F97, F98, L99, and Y100a on the heavy chain and Y49 on the light chain. Interestingly, the numbers of functionally important residues revealed by the shotgun homolog-scan were significantly smaller and contained within the group of residues that were important functionally in the shotgun alanine-scan. These hot spots are W33, G54, V96, F97, and L99, which constitute a small patch that overlapped in both scans, suggesting that this surface makes precise contact with the antigen hVEGF that even homologous amino acid substitutions were disruptive. G55 was substituted with alanine only in the homolog scan and it was a highly disruptive, so we believe that G55 is also within this patch.

[0331] Other functional important residues revealed by both scans on the heavy chain, G50 and T52, are not part of the solvent-exposed surface of G6 since they are buried inside according to the structural information, acting as scaffolding side-chains that pack against residues in the functional epitope in order to hold this epitope in a binding-competent conformation (C. Wiesmann, unpublished results). As for F95 in CDR-H3 of G6, definitely, alanine substitution at this position in alanine-scan was disruptive; nonetheless, this residue is capable of tolerating tyrosine substitution in homolog-scan, suggesting that its role is in maintaining the structure integrity of the antigen-binding site, which has also been confirmed with structural information.

[0332] For Y32, F98, and Y100a, the structural information demonstrated that these surface residues were critical and represented 30% of total heavy chain buried surface areas upon binding hVEGF. The alanine substitutions at these residues were definitely disruptive for affinity with significant function ratios (F_{wt/mut} value) greater than 30, yet interestingly, they tolerated homologous amino acid substitutions (Tyr for Phe and vise versa), suggesting that the aromatic rings for these positions were making the important interactions with hVEGF antigen and adding or removing the hydroxyl group was not making much impact, which were distinct from the above scaffolding residues.

[0333] Both shotgun scans identified new mutations in the heavy chain for further affinity improvement, which were I51 V and Y58A. This intriguing observations were verified through producing Fab point mutants, and testing binding activity with competitive ELISA and BIAcore™ (FIG. 23 and FIG. 18). Because I51 and Y58 are not the members of structural epitope (C. Wiesmann, unpublished results), it was believed that the affinity improvement, especially in on-rate, with single or double mutation was not from the introduction of new contact with antigen hVEGF, but probably through optimizing the structure integrity of CDR-H2 loop, to make it more competent for antigen binding.

[0334] Based on the structural epitope, G6 light chain CDR residues represented 25% of total structural epitope surface (878 Å²)(C. Wiesmann, unpublished results). Interestingly, the only residue that showed functional importance in both shotgun scanning was Y49 in CDR-L2, which only stood for 2% of the total structural epitope surface, suggesting that most structural epitope residues in the light chain were not involved in the energetic contact with hVEGF antigen. This readout implies that G6 light chain is more important structurally than functionally since it still retained the same sequence as 4D5, the template used for displaying antibody library on the phage where G6 was isolated from in the first place (Carter et al., 1992).

### Example 3

### G6 And G6-23 Derived Antibodies

[0335] (a) Libraries for Selection

[0336] Additional anti-VEGF antibodies were obtained by sorting phage from the shotgun alanine and homolog scanning libraries described in Example 2. Specifically, at particular residues, scanned residues were allowed to vary as either wild type or alanine (alanine scan), or either wild type or a homologue residue (homolog scan). (FIGS. 14A and B). For the G6, shotgun alanine and homolog scanning was performed on the G6 light chain and heavy chain separately, resulting in four libraries. For G623, shotgun alanine and homolog scanning was performed on the G623 light chain, and shotgun homolog scanning was performed on G623 heavy chain, resulting in three libraries. A G623 shotgun alanine scanning library was not prepared because, as discussed above, G623 is a high affinity antibody, with most of its residues critical for binding located in the heavy chain. Mutating heavy chain residues to alanine, which means truncating the heavy chain amino acid side chains, would most likely disrupt binding and result in lower affinity antibody variants.

[0337] (b) Selecting Anti-VEGF Antibodies

[0338] In the first round, a plate sorting strategy was used for selection. Human VEGF (hVEGF, provided by Genentech Research Groups) was immobilized on 96-well Maxisorp immunoplates (NUNC) by incubating wells with 5 ug/ml of protein target over night at 4° C. The plates were blocked with 1% Bovine Serum Albumin (BSA, Sigma) for 30 min in RT, after which 1% Tween20 was added for additional 30 min. The phage libraries described above were incubated on the hVEGF coated immunoplates at a concentration of ˜1E13 phage/ml for 1 h in RT under agitation, to allow binding of the phage displayed Fab to the target. After binding, plates were washed 15 times with PBS supplemented with 0.05% Tween20. Bound phage were eluted by incubating wells with 0,1 M HCl for 30 min. Elutions were neutralized with 1.0 M Tris base, pH 11. E. Coli XL1-blue (Stratagene) were infected with the eluted phage and M13-K07 helper phage (New England Biolabs). The phage was propagated over night for the next round of selection.

[0339] The bacterial culture was centrifuged at 8000 rpm for 10 min in a Sorvall GSA rotor at 4° C. and the supernatant collected. The phage was precipitated from the media by addition of 1/5 volume of PEG/NaCl. After 5 min incubation on ice the phage containing culture media was centrifuged at 10 krpm for 15 min in a Sorvall GSA rotor at 4° C. and the supernatant discarded. The remaining phage pellet was resuspended in PBS and centrifuged at 15 krpm for 5 min in a SS-34 rotor at 4° C. to pellet insoluble matter. The supernatant was transferred to a new tube and the phage concentration was estimated by measuring the absorbance at 268 nm.

[0340] The following rounds of sorting were performed by a solution-phase sorting method with increasing stringency. Purified phage was incubated with biotinylated hVEGF for 1 hour at RT in PBS with 0.05% Tween20 and 0.5% Superblock (Pierce). After three to ten-fold dilution with superblock, the mixture was added to neutravidin coated wells blocked with 1% BSA (Sigma) and Tween20. The hVEGF-conjugated biotin was allowed to bind the immobilized neutravidin for 10 min. After capture the plate was washed 10-15 times with 0.05% Tween20 in PBS. To study the background, i.e. nonspecific binding on the phage to neutravidin, a control reaction lacking the biotinylated hVEGF was added to a coated well. The stringency was increased each round by decreasing antigen concentration in solution, as well as phage concentration or increasing temperature. Increasing number of washes is also a way to achieve more stringent conditions. For the third and fourth round of sorting non-biotinylated hVEGF was added to the reaction mix of biotin-hVEGF and library phage to compete off low affinity binders. By adding 1000 fold excess of competitor for 30 min in 37° C. before capturing, stringency could be increased additionally in the last rounds in order to select for high affinity binders. Manipulating binding and capture times could further increase the stringency from round to round.

[0341] For G623 the starting concentration of biotinylated hVEGF was 1 nM for the heavy chain shotgun library and 0.2 nM for the light chain shotgun-scanning library. The concentration was decreased to 0.5 nM and 0.1 nM respectively in the last round. For G6, with lower starting affinity than G623, library sorting was performed with less stringent starting conditions; 5 nM for heavy chain libraries and 2 nM for the light chain libraries, which was decreased to 1.75 and 0.5 nM respectively in the last round of sorting.

[0342] To study the enrichment of hVEGF specific Fabs displayed on the phage, 90 ul E. Coli XL-Blue (Stratagene) was infected with 10 ul phage elution from the captured library binding reactions as well as the background mixtures for 30 min at 37° C. A 5 ul culture was plated out on carbencillin supplemented plates and incubated at 37° C. over night. The number of phage particles in the elution could be calculated from the number of colonies from each elution. After the last two rounds of sorting, 50 ul of the above mentioned culture of phagemid-containing bacteria, was plated out on carbencillin-supplemented plates and grown over night at 37° C. The resulting clones were subject to screening.

[0343] (c) Single Spot Competitive ELISA

[0344] To screen for high affinity clones a high-throughput single point competitive ELISA assay in 96-well format was performed. For both antibodies approximately one hundred clones from the last two rounds of selection were picked randomly and screened in this assay. Phagemid containing E. Coli XL1-blue clones were grown in 400 ul rich 2YT broth, supplemented with carbencillin and M13-KO7 helper phage (New England Biolabs) by shaking over night at 37° C. The culture supernatant of each clone was diluted five times with 0.05% Tween20 and 0.5% BSA in PBS with addition of hVEGF as well as without. After 1 h incubation by shaking in RT, 80 ul of the reactions were transferred to hVEGF-coated immunoplates and incubated for 10 min. The plate was washed 8 times with 0.05% Tween20 in PBS and incubated 30 min with 100 ul anti-M13 antibody horseradish conjugate (New England Biolabs) diluted 5000 times in PBS supplemented with 0.05% Tween20 and 0.5% Bovine Serum Albumin (Sigma). The plates were washed an additional 8 times and developed with TMB substrate for 5 min. The reactions were stopped with 1.0 M H₃PO₄ and read spectrophotometrically at 450 nm. To estimate the relative affinity, the ratio of the optical density in the presence of hVEGF to that of the absence of hVEGF was calculated. A low ratio suggests that most Fab displayed on on the phage bound hVEGF in solution. As a consequence little Fab can bind to the immobilized hVEGF on the immunoplate. Clones showing lower ratio than wild type (WT) G6 or G623 were selected and, their supernatants used to infect XL1-blue. Phagemid containing bacteria were streaked out on carbencillin plates and grown over night at 37° C. for sequencing.

[0345] The selection of the G6 heavy chain libraries resulted in no more than three unique sequences out of the 33 clones analyzed, suggesting that most G6 heavy chain changes result in lost of binding affinity. Furthermore, all unique heavy chain variants derived were from the homolog scan library. It seems that alanine mutation of G6 heavy chain residues can result in a dramatic loss of binding. This intolerance to changes in amino acid sequence selection supports the view that G6 heavy chain harbors many key residues for VEGF binding. The single spot assay is summarized in Table 2.

TABLE 2

| | Single Spot Summary | | | | |
|---|---|---|---|---|---|
| | G623 | | | 66 | |
| Library | LC Ala | LC Hom | HC Hom | LC Ala | HC Ala |
| | | | | and Hom | and Hom |
| Number of | 84 | 84 | 88 | 88 | 96 |
| Clones | | | | | |
| Screened | | | | | |
| Selection | Clones with significantly lower ratio | | | | |
| Criteria | (Signal + hVEGF/Signal − hVEGF) than WT | | | | |
| Cut Off | Cut off = 2 fold reduction | | | Cut off = | Cut off = |
| | | | | 5 fold | WT ratio |
| | | | | reduction | |
| Number of | 33 | 17 | 29 | 56 | 33 |
| Clones with | | | | | |
| ratio < WT | | | | | |
| Number of | 17 | 12 | 18 | 53 | 3 |
| unique | | | | | |
| clones | | | | | |

Results from Single spot assay of G6 and G623 variants. Similar selection criteria was used for both antibody libraries. However, lower cutoffs were used for the G6 LC library compared to the G6 HC library as HC variants were expected to show less affinity improvement compared to WT than LC variants. G6 alanine and homolog libraries were pooled before screening the heavy chain and light chain variants. The number of unique clones from the selected pool was determined by DNA sequencing. LC=Light Chain. HC=Heavy Chain. WT=Wild Type. Hom=Homolog scanning library. Ala=Alanine scanning library

[0346] (d) DNA Sequencing and Analysis

[0347] Clones selected from the single spot screening were grown in 96-well plates with 100 ul 2YT broth supplemented with carbencillin for 2 hours. 1 ul of the culture was subjected to PCR (GeneAmp® PCR System 9700, Applied Biosystems) in order to amplify the DNA encoding the light chain or heavy chain of the different clones. The primers used in the PCR reaction were designed to add M13 universal sequences at the 5′ end of the amplified fragment. By adding this sequence, M13 forward primers could be used in the following sequencing reactions. After amplification in 96-well format, the DNA fragments were sequenced by Genentech DNA sequencing group using Big-Dye terminator sequencing reactions and analyzed with an ABI Prism 3700 96-capillary DNA analyzer. (PE Biosystems, Fosters City, Calif.). The heavy and light chain sequences were aligned and identical sequences eliminated. Based on their sequence, clones were selected for affinity determination by IC50 measurement.

[0348] (e) Affinity Measurement of Phage Clones

[0349] The IC50 values for the phage clones were determined by competitive phage ELISA. A single colony of the selected clones was grown in 5 ml 2YT media supplemented with 50 ug/ml carbencillin for 5 hours. The culture was then infected with M13-K07 helper phage (New England Biolabs) for 1 h and transferred to a 25 ml culture supplemented with 50 ug/ml carbencillin and 50 ug/ml kanamycin. The phage was propagated over night at 37° C. After phage purification as described above, the phage was serially diluted with 0.05% Tween20 and 0.5% BSA in PBS and incubated on a hVEGF coated immunoplate to assess antigen binding at different phage concentrations. The phage dilution that gave ˜70% saturating signal was used in the IC50 determination assay. Phage was incubated with increasing concentration of hVEGF over night at 37° C. The unbound phage was captured on an hVEGF coated immunoplate for 10 min. The plate was washed, and the bound phage was detected with an anti-M13 antibody horseradish conjugate (New England Biolabs) followed by TMB development, as previously described. The hVEGF concentration that inhibited 50% of phage binding to the immobilized antigen represented the IC50. The signals, which indicate bound phage, were plotted against the hVEGF concentration, and the data was fitted to a competitive binding curve by non-linear regression, enabling IC₅₀ determination.

[0350] FIGS. 34 and 35 show the IC₅₀ values of G6 and G6-23 variants, respectively, as well as the alterations in sequences compared to G6 or G6-23. From the G6 pool, many binders with apparent better affinity than wild type G6 were identified. Many more affinity improved G6 variants were derived from the light chain homolog library (FIG. 34A). However, two higher affinity G6 variants were selected from the heavy chain homolog scan library (FIG. 34B).

[0351] Some G6 variants showed up to a hundred-fold affinity improvement, according to the IC₅₀ determinations. Of the few G6 heavy chain variants selected, they differed in only a few residues from wild type G6. These heavy chain mutations were located in CDR-H1 and CDR-H2. The conserved nature of the heavy chain, and CDR-H3 in particular, confirmed that most residues important for G6 binding to hVEGF are present in this region. Mutations were more abundant in the G6 light chain variants. They were mainly located in CDR-L1 and CDR-L3 regions, indicating that changing CDR-L2 residues impairs binding instead of improving affinity. A combination of mutations in CDR-L1 and CDR-L3 seem to be favorable for binding, allowing significant affinity improvement compared to wild type.

[0352] Most G623 variants showed similar or slightly reduced binding affinity compared to wild type according to their IC₅₀ values (FIG. 35). The highest affinity variants were derived from both homolog and alanine light chain shotgun library. Only a small number of high affinity binders were identified in the heavy chain shotgun scan pool. As for G6, heavy chain residues were conserved, and only few mutations present among the clones studied. The light chain variants also showed similar mutation-pattern as G6 variants, with most changes located in CDR-L1 and CDR-L3.

### Example 4

### Alanine Scanning of HVEGF to map Anti-VEGF Antibody Binding Sites

[0353] To understand the molecular basis of the cross reactivity of G6 and G6-23 and to map their functional epitopes, the relative binding affinities of G6 or G6-23 Fab for individual alanine-substituted hVEGF mutants versus wild type hVEGF were measured using hVEGF displaying phage ELISA as previously described (Muller et al., (1997) PNAS USA 94:7192-7197). hVEGF was mutated at sites near the binding epitopes of Flt-1, KDR, the Avastin™ antibody and Y0317 with Kunkel mutagenesis method and phage displaying the individual mutant was generated as described previously (Muller et al., (1997) PNAS USA 94:7192-7197). Solution binding phage ELISAs were used to determine the relative binding affinity of each mutant VEGF mutant versus wild type (wt) VEGF on Fab G6-23, G6-23. Briefly, 96-well Maxisorp immunoplates (NUNC) were coated overnight at 4° C. with G6 or G6-23 Fab at a concentration of 2 ug/ml in PBS, and blocked with PBS, 0.5% BSA, and 0.05% Tween20 (PBT) for 2 h at room temperature. Serial dilutions of phage displaying hVEGF mutants in PBT were first incubated on the G6-Fab-coated plates for 15 min at room temperature, and the plates were washed with PBS, 0.05% Tween20 (PBST). Bound phage were detected with anti-M13 monoclonal antibody horseradish peroxidase (Amersham Pharmacia) conjugate diluted 1:5000 in PBT, developed with 3,3′, 5,5′-tetramethylbenzidine (TMB, Kirkegaard & Perry Labs, Gaithersburg, Md.) substrate for approximately 5 min, quenched with 1.0 M H₃PO₄, and read spectrophotometrically at 450 nm. The relative IC₅₀ values (IC_{50,Ala}/IC_{50,wt}) to represent the fold of reduction in binding affinity, and evaluate the energetic contribution of individual side-chains of hVEGF for interacting with G6 or G6-23 Fab were calculated.

[0354] The ratios of IC50 represented the energetic contribution of the individual side chain in the interaction with G6 Fab (FIG. 19). The general folding of alanine mutants, especially ones that had significant reduction in binding G6, was verified by its near-wild type binding to other molecules that have distinct epitopes on VEGF, such as the Avastin™ antibody, Y0317 or Flt-1, as mapped previously (FIG. 19). It is evident that G6 had a distinct epitope as compared to hybridoma derived Avastin™ antibody. All functionally important hVEGF residues for binding G6 were conserved between human and murine VEGF, thus explaining in part its cross reactivity. The Fab of the Avastin antibody (Fab-12) and Y0317, on the other hand, lost most of their binding to VEGF upon alanine substitution at residue Gly88, which is Ser in mVEGF. To visualize the epitope on a VEGF molecule, functionally important residues for binding G6 were highlighted on the surface of hVEGF crystal structure according to their relative affinities for G6. G6 epitope mapped to a patch that was conserved between human and mouse VEGF and dotted with a few energetically important residues, Phe17, Tyr21, Tyr, Ile83 and Gln89, which clustered in close proximity. This is indicative of a functional epitope with an interaction “hot spot”.

[0355] We next compared the functional epitope of G6 to the structural epitope of Fab-12 (same as Y0317) or Fit-1D2, the VEGF residues that became buried upon forming complex with these molecules based on the crystal structure of the complex. Interestingly, the functional epitope of G6 on VEGF matches the structural epitope for Flt-1D2 more closely than does the structural epitope of Fab-12. Further, G6 shared similar hot spot as Flt-1 for VEGF since residues Phe17, Tyr21 and Tyr25 were highly important energetically for both interactions (FIG. 19). Fab-12 or Y0317, on the other hand, centered on the non-conserved and functionally important residue, Gly88, which is believed to be the reason for its lack of binding to mVEGF. It appeared that phage library derived antibody G6 targeted a conserved epitope on VEGF in a nearly identical fashion as VEGF receptor, while a hybridoma for hVEGF avoided generating a self-reactive anti-mouse antibody. There was, however, sufficient overlap between the two epitopes of G6 and Fab-12 as the binding of G6 and Fab-12 (Y0317) to hVEGF were mutually exclusive (data not shown).

[0356] Comparing the important sites on hVEGF for binding G6 and G6-23 indicated that the residues contributing most energetically, F17, Y21, and Y25 on 20's helix, and Q89A on 80's loop, remained the same, except the impact of residues on binding seemed to change (FIG. 19). For example, residues Y21 and Q89 when changed to alanine became a bigger hit for G6-23 than for G6. There were sites that modestly decreased its relative impact of its side chain in binding to G6-23 as compared to G6, e.g., I83, H86, and I91A.

[0357] There was no new functionally important residues observed for the affinity-improved version, G6-23, yet a shuffling of energetic contributions among these functionally important residues in both antibodies, which was consistent with the finding structurally that identical positions of hVEGF were buried upon complexing with G6 or G6-23 (structural data below). When mapping these functionally important residues along with other moderate contributors on hVEGF structure, they appeared as a contiguous patch within the structural epitope of Flt-1 D2, which were highly conserved between human and mouse VEGF, which explains the fact that both antibodies had equal affinity for both VEGF. By comparison of the footprint of both structural and functional epitope for G6 on hVEGF structure, it clearly showed that heavy chain CDR residues were the ones making contact with the positions on VEGF where alanine mutation were disruptive, such as the 20's helix and 80'loop of hVEGF, whereas light chain CDR residues contact the 60's loop of hVEGF where the side chains were not functionally as important.

[0358] The dilutions of phage that produced the sub-maximal binding signal (50-70%) were used in the solution competition assay where wild type or mutant hVEGF phage in PBT buffer were first incubated with increasing concentration of competing G6 or G6-23 Fab for 1-2 h at room temperature, then the mixtures were transferred to G6-Fab-coated plates to capture the unbound phage for 15 min, and bound phage were detected as described above. Competition curves were fit with a four-parameter non-linear regression curve-fitting program (Kaleidagraph, Synergy Software) to determine the IC₅₀ values which were calculated as the concentration of G6 or G6-23 Fab in solution binding stage that inhibited 50% of the phage from binding to immobilized G6 Fab. The ratio of the IC₅₀ of mutant versus wild type hVEGF is the relative fold difference in binding affinities. For mutants that have severe reduced binding to G6-Fab-coated plate, Fab12 (Presta, 1997) or Flt-1_{D1-5} were used as coat to capture to mutant phage after incubations with G6 or G6-23 Fab. Binding of hVEGF-phage to G6, G6-23 Fab, Fab2, Fab and Flt-1_{D1-5} were mutually exclusive as tested with wild type VEGF phage.

### Example 5

### Structural Mapping of VEGF Binding sites on G6, G6-23 and B20 and of G6 and B20 Binding Sites on VEGF by Crystallography

Expression Purification Crystallization and Structural Analysis

[0359] Residues 8-109 of human VEGF were expressed, refolded, and purified as previously described (Christinger, H. W., et al., (1996). Prot. Struct. Funct. Genet. 26, 353-357).

[0360] G6 Fab was expressed in E. coli and the cell paste was thawed into PBS, 25 mM EDTA, 1 mM PMSF. The mixture was homogenized and then passed twice through a microfluidizer. The suspension was then centrifuged at 12k rpm for 60 min. The protein was loaded onto a Protein G column previously

[0361] equilibrated with PBS at 5 ml/min. The column was washed with PBS to base line and then eluted with 0.58% acetic acid. Fractions containing G6 Fab were pooled and loaded directly onto a SP-sepharose column equilibrated with 20 mM MES, pH 5.5. The protein was eluted with a salt gradient of 0 to 0.25

M NaCl.

[0362] G6 eluted from the SP-sepharose column was mixed with hVEGF8-109 and further purified over a Superdex 200 column equilibrated with 30 mM Tris.Cl, pH 7.5 and 0.4 M NaCl. Fractions containing the complex were pooled, concentrated and used in crystallization trials. Crystals were grown at 19° C. using vapor diffusion method in sitting drops. Crystallization buffer containing 2.0 M ammonium sulfate and 5% iso-propanol were mixed in equal volume with protein solution (8 mg/ml protein). Crystals appeared after 3 days and belonged to space group P3121 with cell dimensions of a=117.9 Å and c=212.6 Å. These crystal forms contained 1 complex comprising of a VEGF dimer and 2 Fab molecules in the asymmetric unit.

[0363] The crystals were soaked in mother liquor, dipped in artificial mother liquor containing 25% glycerol and flash frozen in liquid nitrogen. A 2.8 Å data set was collected on an SSRL Synchrotron Source on beam line 9-1. The data were reduced using programs DENZO and SCALEPACK (Otwinowski, Z. (1993). DENZO. In Data Collection and Processing, L. Sawyer, N. Isaacs, and S. Bailey, eds. (Warrington, UK: 1993).

[0364] Structure Determination and Refinement

[0365] The structure was solved by molecular replacement using the coordinates of VEGF (from PDB code 1FLT), constant and variable domains of the antibody in 1BJI (Brookhaven data base) and program AMoRe (CCP4 1994). Model building was done with program O and refinement with Refmac (CCP4 1994). The final Rvalue and Rfree are 19.87% and 23.92%, respectively.

[0366] The following programs were used to calculate the surface areas of interaction RESAREA version 3.2: Aug. 5, 1993 and AREAIMOL version 3.2: Dec. 19, 1995. These programs are part of the CCP4 suite Collaborative Computational Project, Number 4. 1994 (“The CCP4 Suite: Programs for Protein Crystallography” Acta Cryst. D50, 760-763).

[0367] The surface area of each residue of an anti-VEGF antibody that is buried in VEGF (Å²) is reported below together with the percentage of the total surface area of the residue that is buried. Also reported is the surface area of each residue of VEGF antibod that is buried in VEGF (Å²) is reported below together with the percentage of the total surface area of the residue that is buried. See values for G6:VEGF, G6-23:VEGF, Fab-12:VEGF, YADS-1:VEGF and YADS-2:VEGF complex below. In all cases, because VEGF is a dimer, the residue numbers of VEGF referring to monomer 1 (of the VEGF dimer) are 8-109 and residue numbers of VEGF referring to monomer 2 (of the VEGF dimer) are 1008-1109. The first column in each table below recites the residue numbers of the protein being examined (either VEGF or an anti-VEGF antibody) (e.g., for section (a) below, PHE A 17 refers to F17, LYS A1048 refers to K48; MET A1081 refers to MET 81 of VEGF). The second column recites the buried surface of that residue (A²). The third column recites the buried surface for that residue as a percentage of the surface area of the whole residue.

[0368] (a) VEGF:G6 Complex

TABLE 3
Residues of VEGF in contact with G6

| Residue Nr | buried surface | buried surface in % |
|---|---|---|
| PHE A 17 | 17.00 | 54.84% of 31.00 |
| MET A 18 | 59.00 | 57.84% of 102.00 |
| TYR A 21 | 62.00 | 100.00% of 62.00 |
| GLN A 22 | 65.00 | 48.51% of 134.00 |
| TYR A 25 | 54.00 | 70.13% of 77.00 |
| ASP A 63 | 54.00 | 68.35% of 79.00 |
| GLU A 64 | 31.00 | 23.66% of 131.00 |
| LEU A 66 | 33.00 | 73.33% of 45.00 |
| CYS A 104 | 10.00 | 34.48% of 29.00 |
| PRO A 106 | 49.00 | 48.51% of 101.00 |
| LYS A1048 | 40.00 | 86.96% of 46.00 |
| MET A1081 | 17.00 | 94.44% of 18.00 |
| ILE A1083 | 25.00 | 89.29% of 28.00 |
| LYS A1084 | 1.00 | 0.88% of 114.00 |
| PRO A1085 | 2.00 | 3.77% of 53.00 |
| HIS A1086 | 103.00 | 53.65% of 192.00 |
| GLN A1087 | 19.00 | 12.18% of 156.00 |
| GLY A1088 | 13.00 | 38.24% of 34.00 |
| GLN A1089 | 119.00 | 88.15% of 135.00 |
| HIS A1090 | 22.00 | 20.37% of 108.00 |
| ILE A1091 | 30.00 | 47.62% of 63.00 |

CHAIN A DIFF-AREA: 825.0 (7.47% of 11043.0 total AREA for this chain)

[0369] TABLE 4
Residues of G6 in contact with VEGF
Residues 1:211 refer to the light chain. Residues
1001:1223 refer to heavy chain

| Residue Nr | buried surface | buried surface in % |
|---|---|---|
| ASP B 28 | 38.00 | 38.00% of 100.00 |
| SER B 30 | 23.00 | 47.92% of 48.00 |
| TYR B 49 | 19.00 | 65.52% of 29.00 |
| PHE B 53 | 25.00 | 21.55% of 116.00 |
| TYR B 92 | 70.00 | 94.59% of 74.00 |
| THR B 93 | 19.00 | 38.00% of 50.00 |
| SER B1030 | 17.00 | 21.52% of 79.00 |
| ASP B1031 | 96.00 | 84.21% of 114.00 |
| TYR B1032 | 24.00 | 41.38% of 58.00 |
| TRP B1033 | 52.00 | 77.61% of 67.00 |
| ILE B1051 | 14.00 | 29.79% of 47.00 |
| PRO B1053 | 38.00 | 97.44% of 39.00 |
| ALA B1054 | 26.00 | 42.62% of 61.00 |
| GLY B1055 | 49.00 | 96.08% of 51.00 |
| GLY B1056 | 39.00 | 97.50% of 40.00 |
| TYR B1057 | 38.00 | 22.35% of 170.00 |
| PHE B1099 | 2.00 | 100.00% of 2.00 |
| PHE B1101 | 101.00 | 90.99% of 111.00 |
| PHE B1102 | 109.00 | 84.50% of 129.00 |
| LEU B1103 | 10.00 | 62.50% of 16.00 |
| PRO B1104 | 5.00 | 13.16% of 38.00 |
| TYR B1105 | 42.00 | 66.67% of 63.00 |

CHAIN B DIFF-AREA: 856.0 (4.44% of 19280.0 total AREA for this chain)
TOTAL DIFF-AREA: 1681.0 (5.54% of 30323.0 total AREA over all chains)

[0370] (b) VEGF:G6-23 Complex

TABLE 5
Residues of VEGF in contact with G6-23
Residues 8:109 relate to monomer 1 (of the VEGF dimer).
Residues 1008:1109 to monomer 2 (of the VEGF dimer)

| Residue Nr | buried surface | buried surface in % |
|---|---|---|
| LYS A 48 | 35.00 | 64.81% of 54.00 |
| MET A 81 | 23.00 | 95.83% of 24.00 |
| ILE A 83 | 18.00 | 90.00% of 20.00 |
| LYS A 84 | 1.00 | 1.04% of 96.00 |
| PRO A 85 | 2.00 | 4.76% of 42.00 |
| HIS A 86 | 114.00 | 55.34% of 206.00 |
| GLN A 87 | 18.00 | 11.18% of 161.00 |
| GLY A 88 | 14.00 | 42.42% of 33.00 |
| GLN A 89 | 116.00 | 87.88% of 132.00 |
| HIS A 90 | 22.00 | 16.30% of 135.00 |
| ILE A 91 | 33.00 | 49.25% of 67.00 |
| PHE A1017 | 24.00 | 68.57% of 35.00 |
| MET A1018 | 56.00 | 46.67% of 120.00 |
| TYR A1021 | 72.00 | 100.00% of 72.00 |
| GLN A1022 | 68.00 | 56.20% of 121.00 |
| TYR A1025 | 58.00 | 67.44% of 86.00 |
| CYS A1061 | 3.00 | 16.67% of 18.00 |
| ASP A1063 | 46.00 | 58.97% of 78.00 |
| GLY A1065 | 7.00 | 18.92% of 37.00 |
| LEU A1066 | 38.00 | 70.37% of 54.00 |
| GLU A1103 | 5.00 | 6.17% of 81.00 |
| CYS A1104 | 16.00 | 72.73% of 22.00 |
| ARG A1105 | 2.00 | 1.80% of 111.00 |
| PRO A1106 | 67.00 | 68.37% of 98.00 |

CHAIN A DIFF-AREA: 858.0 (7.65% of 11223.0 total AREA for this chain)

[0371] TABLE 6
Residues of G6-23 in contact with VEGF
Residues 1:211 refer to the light chain. Residues
1001:1223 refer to the heavy chain.

| Residue Nr | buried surface | buried surface in % |
|---|---|---|
| ASP B 28 | 25.00 | 27.17% of 92.00 |
| SER B 30 | 44.00 | 75.86% of 58.00 |
| THR B 31 | 6.00 | 10.91% of 55.00 |
| ALA B 32 | 1.00 | 33.33% of 3.00 |
| TYR B 49 | 21.00 | 58.33% of 36.00 |
| PHE B 53 | 21.00 | 19.27% of 109.00 |
| TYR B 92 | 72.00 | 71.29% of 101.00 |
| SER B1030 | 18.00 | 24.00% of 75.00 |
| ASP B1031 | 96.00 | 84.21% of 114.00 |
| TYR B1032 | 28.00 | 48.28% of 58.00 |
| TRP B1033 | 47.00 | 73.44% of 64.00 |
| ILE B1051 | 14.00 | 32.56% of 43.00 |
| PRO B1053 | 29.00 | 65.91% of 44.00 |
| ALA B1054 | 28.00 | 57.14% of 49.00 |
| GLY B1055 | 51.00 | 89.47% of 57.00 |
| GLY B1056 | 34.00 | 97.14% of 35.00 |
| TYR B1057 | 37.00 | 21.76% of 170.00 |
| PHE B1099 | 1.00 | 33.33% of 3.00 |
| PHE B1101 | 113.00 | 86.92% of 130.00 |
| PHE B1102 | 101.00 | 84.17% of 120.00 |
| LEU B1103 | 12.00 | 80.00% of 15.00 |
| PRO B1104 | 4.00 | 8.00% of 50.00 |
| TYR B1105 | 54.00 | 68.35% of 79.00 |

CHAIN B DIFF-AREA: 857.0 (4.38% of 19547.0 total AREA for this chain)
TOTAL DIFF-AREA: 1715.0 (5.57% of 30770.0 total AREA over all chains)

[0372] (c) VEGF: Fab-12

TABLE 7
Residues of VEGF in contact with Fab-12 (PDB code 1bj1)
Residues 8:109 relate to monomer 1 (of the VEGF dimer).
Residues 1008:1109 to monomer 2 (of the VEGF dimer)

| Residue Nr | buried surface | buried surface in % |
|---|---|---|
| TYR A 45 | 30.00 | 48.39% of 62.00 |
| LYS A 48 | 23.00 | 41.82% of 55.00 |
| GLN A 79 | 13.00 | 38.24% of 34.00 |
| TYR A 45 | 30.00 | 48.39% of 62.00 |
| LYS A 48 | 23.00 | 41.82% of 55.00 |
| GLN A 79 | 13.00 | 38.24% of 34.00 |
| ILE A 80 | 1.00 | 100.00% of 1.00 |
| MET A 81 | 37.00 | 100.00% of 37.00 |
| ARG A 82 | 53.00 | 85.48% of 62.00 |
| ILE A 83 | 30.00 | 71.43% of 42.00 |
| LYS A 84 | 11.00 | 20.00% of 55.00 |
| HIS A 86 | 77.00 | 37.93% of 203.00 |
| GLN A 87 | 119.00 | 80.95% of 147.00 |
| GLY A 88 | 38.00 | 100.00% of 38.00 |
| GLN A 89 | 134.00 | 100.00% of 134.00 |
| HIS A 90 | 114.00 | 100.00% of 114.00 |
| ILE A 91 | 75.00 | 93.75% of 80.00 |
| GLY A 92 | 33.00 | 100.00% of 33.00 |
| GLU A 93 | 83.00 | 62.41% of 133.00 |
| MET A 94 | 5.00 | 50.00% of 10.00 |
| PHE A1017 | 25.00 | 55.56% of 45.00 |
| TYR A1021 | 16.00 | 21.92% of 73.00 |

CHAIN A DIFF-AREA: 917.0 (8.42% of 10895.0 total AREA for this chain)

[0373] TABLE 8
Residues of Fab-12 in contact with VEGF
Residues 1:211 refer to the light chain. Residues
1001:1223 refer to the heavy chain.

| Residue Nr | buried surface | buried surface in % |
|---|---|---|
| TYR B 91 | 4.00 | 40.00% of 10.00 |
| SER B 92 | 12.00 | 25.00% of 48.00 |
| THR B 93 | 2.00 | 4.44% of 45.00 |
| VAL B 94 | 34.00 | 37.36% of 91.00 |
| TRP B 96 | 19.00 | 86.36% of 22.00 |
| THR B1030 | 5.00 | 11.36% of 44.00 |
| ASN B1031 | 85.00 | 80.19% of 106.00 |
| TYR B1032 | 22.00 | 52.38% of 42.00 |
| GLY B1033 | 9.00 | 100.00% of 9.00 |
| TRP B1050 | 53.00 | 91.38% of 58.00 |
| ASN B1052 | 31.00 | 86.11% of 36.00 |
| THR B1053 | 3.00 | 75.00% of 4.00 |
| TYR B1054 | 93.00 | 51.96% of 179.00 |
| THR B1055 | 6.00 | 7.41% of 81.00 |
| THR B1059 | 29.00 | 53.70% of 54.00 |
| TYR B1099 | 12.00 | 100.00% of 12.00 |
| PRO B1100 | 13.00 | 81.25% of 16.00 |
| HIS B1101 | 58.00 | 56.31% of 103.00 |
| TYR B1102 | 122.00 | 95.31% of 128.00 |
| TYR B1103 | 34.00 | 18.68% of 182.00 |
| GLY B1104 | 41.00 | 50.62% of 81.00 |
| SER B1105 | 4.00 | 6.67% of 60.00 |
| SER B1106 | 41.00 | 77.36% of 53.00 |
| HIS B1107 | 4.00 | 23.53% of 17.00 |
| TRP B1108 | 96.00 | 97.96% of 98.00 |

CHAIN B DIFF-AREA: 832.0 (4.29% of 19409.0 total AREA for this chain)
TOTAL DIFF-AREA: 1749.0 (5.77% of 30304.0 total AREA over all chains)

[0374] (d) VEGF:B20

TABLE 9
Residues of VEGF buried in B20

| Residue Nr | buried surface | buried surface in % |
|---|---|---|
| LYS A 16 | 54.00 | 41.22% of 131.00 |
| PHE A 17 | 43.00 | 100.00% of 43.00 |
| MET A 18 | 150.00 | 100.00% of 150.00 |
| ASP A 19 | 55.00 | 90.16% of 61.00 |
| TYR A 21 | 75.00 | 94.94% of 79.00 |
| GLN A 22 | 116.00 | 92.80% of 125.00 |
| ARG A 23 | 84.00 | 68.29% of 123.00 |
| TYR A 25 | 85.00 | 90.43% of 94.00 |
| CYS A 26 | 6.00 | 54.55% of 11.00 |
| HIS A 27 | 10.00 | 20.83% of 48.00 |
| MET A 55 | 1.00 | 1.45% of 69.00 |
| CYS A 61 | 7.00 | 46.67% of 15.00 |
| ASN A 62 | 3.00 | 12.50% of 24.00 |
| ASP A 63 | 4.00 | 5.06% of 79.00 |
| LEU A 66 | 21.00 | 40.38% of 52.00 |
| ASN A 100 | 9.00 | 13.24% of 68.00 |
| LYS A 101 | 63.00 | 60.00% of 105.00 |
| GLU A 103 | 33.00 | 38.82% of 85.00 |
| CYS A 104 | 13.00 | 54.17% of 24.00 |
| GLU A1030 | 37.00 | 39.78% of 93.00 |
| LYS A1048 | 36.00 | 54.55% of 66.00 |
| PRO A1053 | 2.00 | 14.29% of 14.00 |
| GLN A1079 | 8.00 | 14.29% of 56.00 |
| MET A1081 | 34.00 | 100.00% of 34.00 |
| ILE A1083 | 17.00 | 48.57% of 35.00 |
| GLN A1089 | 58.00 | 45.67% of 127.00 |
| ILE A1091 | 21.00 | 30.88% of 68.00 |

CHAIN A DIFF-AREA: 1045.0 (8.59% of 12163.0 total AREA for this chain)
A = light chain
B = heavy chain

[0375] TABLE 10
Residues of B20 buried in VEGF

| Residue Nr | buried surface | buried surface in % |
|---|---|---|
| ARG B 30 | 102.00 | 55.43% of 184.00 |
| ARG B 31 | 3.00 | 3.00% of 100.00 |
| SER B 32 | 11.00 | 32.35% of 34.00 |
| TYR B 49 | 12.00 | 30.77% of 39.00 |
| SER B 52 | 20.00 | 38.46% of 52.00 |
| ASN B 53 | 41.00 | 82.00% of 50.00 |
| LEU B 54 | 3.00 | 4.17% of 72.00 |
| SER B 91 | 13.00 | 68.42% of 19.00 |
| ASN B 92 | 44.00 | 84.62% of 52.00 |
| THR B 93 | 22.00 | 39.29% of 56.00 |
| SER B 94 | 37.00 | 63.79% of 58.00 |
| LEU B 96 | 1.00 | 33.33% of 3.00 |
| TRP B1033 | 46.00 | 100.00% of 46.00 |
| HIS B1035 | 1.00 | 100.00% of 1.00 |
| TRP B1047 | 4.00 | 40.00% of 10.00 |
| ALA B1050 | 2.00 | 100.00% of 2.00 |
| TYR B1052 | 61.00 | 81.33% of 75.00 |
| TYR B1054 | 81.00 | 52.60% of 154.00 |
| SER B1055 | 40.00 | 50.63% of 79.00 |
| TYR B1057 | 81.00 | 72.32% of 112.00 |
| ASN B1059 | 34.00 | 79.07% of 43.00 |
| TYR B1060 | 2.00 | 6.06% of 33.00 |
| TRP B1099 | 27.00 | 93.10% of 29.00 |
| HIS B1101 | 118.00 | 70.66% of 167.00 |
| SER B1102 | 16.00 | 20.78% of 77.00 |
| THR B1103 | 4.00 | 28.57% of 14.00 |
| SER B1104 | 11.00 | 33.33% of 33.00 |
| PRO B1105 | 54.00 | 85.71% of 63.00 |
| TRP B1106 | 52.00 | 100.00% of 52.00 |

CHAIN B DIFF-AREA: 943.0 (4.90% of 19242.0 total AREA for this chain)
TOTAL DIFF-AREA: 1988.0 (6.33% of 31405.0 total AREA over all chains)

[0376] The residues having greater than 5 Å² buried surface area and/or greater than 5% buried were considered significantly contacted. These results help describe the regions in VEGF and the regions in the antibodies that contact one another. Together with functional data relating to the binding VEGF presented earlier, common features of the G6 series of antibodies and the B20 series of antibodies (structural data not shown) can be observed. G6, G6-23 and B20 antibodies, as well as others bound to both mouse and human VEGF with relatively high affinities, unlike Fab-12 or YO317 (data not shown). Mutations of human VEGF G88A or G88S severely effected binding of Fab-12 or YO317 to VEGF, whereas the G6 series of antibodies and the B20 series of antibodies were relatively unaffected. Further, the binding of antibodies such as Fab-12 to VEGF resulted in the surface area of G88 being 100% buried whereas the binding of G6 and G6-23 resulted in G88 being less than 66% buried. Thus, it is believed that although partial contact with G88 is allowable for antibodies having the property of recognizing both mouse and human VEGF with good affinity, it is not likely that antibodies that contact human VEGF such that the surface area of Gly88 of human VEGF is 80% or more buried will bind to both mouse and human VEGF with good affinity. The functional epitope mapping results also show that the footprint of the G series of antibodies on VEGF is different from Fab-12 in that it has a greater contact extending into the 20's helix of VEGF (approximately residues numbered 10-30 of human VEGF) as well as contacting residues in the 80 s loop (approximately residues 80-94 of human VEGF). The structural studies correlate well with the functional studies (see FIG. 19) in that mutations to several residues in the 20 s helix decrease binding of the G6 and B20 series antibodies. The functional studies described in FIG. 19 indicate that the G6 and the B20 series antibodies interact well with residues that are important for both Flt-1 and KDR binding as compared to A4.6.1

### Example 6

### Tetrinomial Diversity Libraries

[0377] To investigate whether a small subsets of the natural amino acids could be used to generate antigen-binding surfaces, we constructed naïve heavy chain phage-displayed libraries of antigen-binding fragments (Fabs) based on the humanized Fab4D5 (30), which recognizes the extracellular domain of the human receptor tyrosine kinase ErbB2 (Fendly, B. M., et al., (1990), Cancer Res. 50:1550-8. First, a previously described phagemid was modified to display bivalent Fab4D5 (Fab′-zip) on the surface of M13 bacteriophage. The gene coding for the Fab′-zip was fused to the C-terminal domain of the M13 gene-3 minor coat protein and expressed under the control of the phoA promoter (Lee, V., et al., (2004) J. Immunol. Methods 284:119-132). The phagemid was modified by a single mutation in the light chain (R66G) and by the introduction of TAA stop codons into all three heavy chain CDRs. For each library construction, the resulting phagemid (pV-0116c) was used as the “stop template” in a mutagenesis reaction with oligonucleotides designed to repair simultaneously the stop codons and introduce designed mutations at the desired sites, as described previously (Sidhu, S. S. et al., (2004) J. Mol. Biol. 338(2):299-310; Sidhu, S S et al., (2000) Methods in Enzymology 328:333-363).

[0378] a. Construction of KMT Library

[0379] Solvent-accessible positions within the heavy chain CDRs encoded by the phagemid were replaced by a single type of degenerate codon, KMT, that produced equal proportions of four amino acids (Y, A, D, S). The number of possible tetranomial combinations of the 20 natural amino acids is too great to be investigated exhaustively, and thus, we chose combinations that fulfilled two criteria. Firstly, we were restricted to combinations that could be accessed with standard DNA synthesis methods. Secondly, we ensured that each tetranomial set contained at least one small amino acid (glycine, serine or alanine), as we reasoned that small residues would provide conformational flexibility and prevent steric crowding. A total of 18 positions were chosen for randomization: positions 28 and 30-33 in CDR-H1; positions 50, 52, 53, 54, 56 and 58 in CDR-H2; and positions 95-100a in CDR-H3. Each constructed library contained ˜10¹⁰ unique members, and thus, the library diversities were only about one order of magnitude less than the maximum theoretical diversity (4¹⁸=7×10¹⁰). The KMT library name corresponds to the degenerate codon used; equimolar DNA degeneracies are represented by IUB code (K=G/T, M=A/C, R=A/G, S=G/C, W=A/T, Y=C/T).

[0380] b. Sorting and Binding Assays for the KMT Library

[0381] Phage from the naïve heavy chain library was cycled through rounds of binding selection with either human vascular endothelial growth factor (hVEGF) or other antigens on 96-well Maxisorp immunoplates (NUNC) as the capture target, as described previously (Sidhu, S. S. et al., (2004) supra; Sidhu, SS et al., (2000) Methods in Enzymology 328:333-363). Bound phage were eluted with 0.1 M HCl for 10 min and the eluant was neutralized with 1.0 M Tris base. Phage were propogated in E. coli XL1-blue (Stratagene) with the addition of M13-KO7 helper phage (New England Biolabs).

[0382] After three rounds of selection, individual clones were grown in a 96-well format in 500 ul of 2YT broth supplemented with carbenicillin and M13-KO7. The culture supernatants were used in phage ELISAs to detect positive clones that bound to antigen-coated plates but not to BSA-coated plates (Sidhu, S. S. et al., (2004) supra). Positive clones were subjected to DNA sequence analysis assessed for antigen-specific binding with phage enzyme-linked immunosorbant assays (ELISAs) (Sidhu, S. S. et al., (2004) supra). Approximately 100 clones were screened against each antigen and specific binding clones were identified in each case. DNA sequencing revealed the number of unique clones isolated against each antigen. At least one tyrosine-containing library was successful against each antigen. In particular, Library-KMT was successful against 3 of the 4 antigens and generated 11 unique clones against human vascular endothelial growth factor (hVEGF).

[0383] c. Second KMT Library—Light Chain Diversity

[0384] We constructed new versions of the KMT Library in which the CDR-H1 and CDR-H2 diversities were the same as described above, but the diversity of CDR-H3 was increased by allowing for all possible length variations ranging from 3-15 residues inserted between residues 94 and 100b. All together, the pooled libraries contained a diversity of ˜10¹⁰ unique members that were cycled through selections for binding to hVEGF. Phage ELISA screens identified 93 hVEGF binders and DNA sequencing revealed 15 unique sequences (FIG. 36). Most of the clones contained CDR-H3 sequences with seven inserted residues, but we also identified two clones that contained longer insertions. The unique clones were subjected to competitive phage ELISAs (Sidhu, S. S. et al., (2004) supra) and exhibited estimated affinities in the 10 micromolar range (data not shown).

[0385] d. Affinity Maturation of Unique Clones from Second KMT Library

[0386] We next investigated whether the low affinity anti-VEGF clones could be affinity matured to obtain Fabs with affinities comparable to those of natural antibodies. To this end, we recombined the 15 heavy chains (FIG. 36) with a light chain library in which 12 solvent-accessible positions were replaced with the same tetranomial KMT codon. Specifically, the following light chain positions were randomized: positions 28-32 in CDR-L1, positions 50 and 53 in CDR-L2, and positions 91-94 and 96 in CDR-L3. The libraries contained ˜10¹⁰ unique members which greatly exceeded the theoretical diversity of possible light chains (4¹²=2×10⁷). The phagemid selected for the display of a heavy chain sequence and above light chain sequence had been modified by the introduction of TAA stop codons into all three light chain CDRs. The resulting phagemid was used as the “stop template” in a mutagenesis reaction that repaired the stop codons and introduced desired mutations, as described above.

[0387] Phage from the light chain libraries were incubated for 2 h at room temperature in PBS, 0.05% Tween 20 (Sigma), 0.5% Superblock (Pierce) with 100 nM hVEGF biotinylated with Sulfo-NHS-LC-Biotin reagent (Pierce). Biotinylated hVEGF and bound phage were captured for 5 min with neutravidin (Pierce) immobilized on Maxisorp immunoplates. The plates were washed with PBS, 0.05% Tween 20 and the bound phage were eluted and propagated for additional rounds of selection, as described above.

[0388] After selection, individual clones were grown in a 96-well format in 500 ul of 2YT broth supplemented with carbenicillin and M13-KO7. The culture supernatants were used in phage ELISAs to detect positive clones that bound to antigen-coated plates but not to BSA-coated plates (Sidhu, S. S. et al., (2004) supra). Positive clones were subjected to DNA sequence analysis.

[0389] hVEGF in solution was used for a high stringency selection. We sequenced 256 clones and identified 64 unique light chains combined with 9 of the 15 heavy chains (top 9 sequences in FIG. 36). Competitive phage ELISAs were used to estimate affinities of clones (Sidhu, S. S. et al., (2004) supra). Such ELISAs were carried out generally as follows. Phage clones were propagated from a single colony by growing in 40 ml of 2YT culture supplemented with carbenicillin and KO7 helper phage overnight at 30° C. Phage purified by PEG/NaCl precipitation were first serially diluted in PBST and tested for binding to an antigen-coated plate (hVEGF or mVEGF). The dilution that gave 50-70% saturating signal was used in the solution binding assay in which phage were first incubated with increasing concentration of antigen for 1-2 h and then transferred to antigen coated plate to capture the unbound phage for 10-15 min. An IC₅₀ was calculated as the concentration of antigen in solution binding stage that inhibited 50% of the phage from binding to immobilized antigen. The three highest affinity phage clones were YADS1, YADS2 and YADS3, which clones were converted into Fabs.

[0390] e. YADS1, 2 and 3 Fab Binding Affinities

[0391] YADS1, 2 and 3 were purified as free Fab proteins for detailed analysis. The sequence of these Fabs are provided below. See also FIG. 39.

YADS1 Light Chain
DIQMTQSPSSLSASVGDRVTITCRASQSYAYAVAWYQQKPGKAPKLLIYDASYLYSGVPS
RFSGSGSGTDFTLTISSLQPEDFATYYCQQSYYSPYTFGQGTKVEIKRTVAAPSVFIFPPSDE
QLKSGTASVVCLLNNFYPREAKVQWKVDNALQSGNSQESVTEQDSKDSTYSLSSTLTLSK
ADYEKHKVYACEVTHQGLSSPVTKSFNRGEC
YADS1 Heavy Chain
EVQLVESGGGLVQPGGSLRLSCAASGFSISSSSIHWVRQAPGKGLEWVAYISPSSGSTSYA
DSVKGRFTISADTSKNTAYLQMNSLRAEDTAVYYCSRYYSSSYYYSYYYAMDYWGQGT
LVTVSSASTKGPSVFPLAPSSKSTSGGTAALGCLVKDYFPEPVTVSWNSGALTSGVHTFPA
VLQSSGLYSLSSVVTVPSSSLGTQTYICNVNHKPSNTKVDKKVEPKSCDKTH
YADS2 Light Chain
DIQMTQSPSSLSASVGDRVTITCRASQSYAYAVAWYQQKPGKAPKLLIYDASYLYSGVPS
RFSGSGSGTDFTLTISSLQPEDFATYYCQQAYSSPDTFGQGTKVEIKRTVAAPSVFIFPPSDE
QLKSGTASVVCLLNNFYPREAKVQWKVDNALQSGNSQESVTEQDSKDSTYSLSSTLTLSK
ADYEKHKVYACEVTHQGLSSPVTKSFNRGEC
YADS2 Heavy Chain
MKKNIAFLLASMFVFSIATNAYAEVQLVESGGGLVQPGGSLRLSCAASGFAISDYDIHWV
RQAPGKGLEWVADIAPYAGATAYADSVKGRFTISADTSKNTAYLQMNSLRAEDTAVYY
CSRSSYAYYAAMDYWGQGTLVTVSSASTKGPSVFPLAPSSKSTSGGTAALGCLVKDYFPE
PVTVSWNSGALTSGVHTFPAVLQSSGLYSLSSVVTVPSSSLGTQTYICNVNHKPSNTKVD
KKVEPKSCDKTH
YADS3 Light Chain
DIQMTQSPSSLSASVGDRVTITCRASQASYYDVAWYQQKPGKAPKLLIYAASYLYSGVPS
RFSGSGSGTDFTLTISSLQPEDFATYYCQQYYYAPATFGQGTKVEIKRTVAAPSVFIFPPSD
EQLKSGTASVVCLLNNFYPREAKVQWKVDNALQSGNSQESVTEQDSKDSTYSLSSTLTLS
KADYEKHKVYACEVTHQGLSSPVTKSFNRGEC
YADS3 Heavy Chain
MKKNIAFLLASMFVFSIATNAYAEVQLVESGGGLVQPGGSLRLSCAASGFSISDYDIHWV
RQAPGKGLEWVAAIAPYSGSTYYADSVKGRFTISADTSKNTAYLQMNSLRAEDTAVYYC
SRSSYAYYSAMDYWGQGTLVTVSSASTKGPSVFPLAPSSKSTSGGTAALGCLVKDYFPEP
VTVSWNSGALTSGVHTFPAVLQSSGLYSLSSVVTVPSSSLGTQTYICNVNHKPSNTKVDK
KVEPKSCDKTH

[0392] Fab proteins were purified from E. coli shake-flask cultures, as described previously (Muller, Y A et al., (1998) Structure 6:1153-1167). Generally, the variable domains were cloned into vectors designed for Fab expression in E. coli or transient IgG expression in mammalian cells. The Fab expression vector was derived from the phage display phagemid by deleting the sequence encoding for cP3 and adding a terminator sequence (GCTCGGTTGCCGCCGGGCGTTTTTTAT) about 20 nucleotides downstream from the stop codon at the end of C_{H} 1. Fab protein was generated by growing the transformed 34B8 E. coli cells in AP5 media at 30° C. for 24 h as described (Presta, L. G., et al., (1997) Cancer Res. 57, 4593-4599). Fab was purified with Protein G affinity chromatography. The production yield for Fab was typically 5-10 mg/L in small scale shake flask growth and 0.5-3 g/L in fermenter growth.

[0393] Binding kinetic values for the purified Fabs based on surface plasmon resonance are shown below. hVEGF₈₋₁₀₉ or mVEGF were immobilized on CM5 chips at ˜100 response units in a BIAcore™-3000, as described previously (Chen, Y., et al., (1999) J. Mol. Biol. 293:865-881). Serial dilutions of Fab proteins (3-500 nM) were injected, and binding responses on the hVEGF or mVEGF flow cell were corrected by subtraction of responses on a blank flow cell. For kinetic analysis, a 1:1 Languir model with separate fittings of kₒₙ and k_{off} was used. The K_{d} values were estimated from the ratios of kₒₙ and k_{off}. All three Fabs bound with high affinity to hVEGF, but only two exhibited appreciable affinity for the highly homologous murine VEGF (mVEGF, 90% amino acid identity). We reasoned that YADS2 and YADS3 recognized VEGF through a very similar mechanism, as they exhibited high sequence homology in their CDRs and bound to both human and murine VEGF. In contrast, YADS1 likely represented a unique mode of antigen recognition as it contained very different CDR sequences and did not recognize mVEGF.

Kinetic analysis of Fabs binding to immobilized VEGF

| | kₒₙ (S⁻¹ M⁻¹) | | k_{off} (s⁻¹) | | K_{d} (nM) | |
|---|---|---|---|---|---|---|
| Fab | hVEGF | mVEGF | hVEGF | mVEGF | hVEGF | mVEGF |
| YADS 1 | 3 × 10⁵ | ND¹ | 5 × 10⁻⁴ | ND¹ | 1.8 ± 0.3 | >1000 |
| YADS 2 | 1 × 10⁶ | 8 × 10⁵ | 1 × 10⁻² | 4 × 10⁻³ | 10 ± 2 | 5.0 ± 0.8 |
| YADS 3 | 1 × 10⁶ | 2 × 10⁶ | 3 × 10⁻³ | 5 × 10⁻³ | 2.0 ± 0.4 | 3.7 ± 0.6 |

¹Values could not be determined due to the low affinity of the interaction.

[0394] YADS2 Fab inhibited VEGF induced HUVEC proliferation (FIG. 44). Generally, the HUVEC proliferation assay was performed as described by others previously (Chen, Y., (1999) J. Mol. Biol. 293:865-881). Basically, HUVEC assays are carried out by testing YADS2 (or G6, etc.) for their ability to block either human or murine VEGF from stimulating the growth of human umbilical vein endothelial cells (HuVECs). Approximately 3000 HuVECs were plated in each well of the 96-well cell culture plate and fasted in F12:DMEM 50:50 medium supplemented with 1.5% (v/v) filtered fetal bovine serum for over night. Fresh assay medium with fixed amounts of VEGF (0.6 nM final concentration), determined by first titrating VEGF that can stimulate submaximal DNA synthesis, and increasing concentrations of anti-VEGF Fab were then added to the cells. After incubation at 37C for 24 h, the cells were pulsed with 0.5 μCi/well of [3H] thymidine for 24 h and harvested for counting with a TopCount Microplate Scintillation counter. The IC50 was determined to be approximately 12 nM.

### Example 7

### Crystallization, Structure Determination and Refinement of YADS1 and YADS2

[0395] We wanted to study the structural basis for antigen recognition, and so, the crystal structures of YADS1 and YADS2 in complex with HVEGF.

[0396] a. Fab Protein Preparation for Crystal Structure Analysis

[0397] Whole cell broth was obtained from a 10 liter E. coli fermentation. The cells were lysed with a Manton-Gaulin homogenizer. The suspension was centrifuged, the supernatant was loaded on a protein A-Sepharose column (Genentech, Inc.), and the column was eluted with 0.1 M acetic acid. The pH was adjusted to 4.0 with 1.0 M Tris, pH 8.0 and the eluant was loaded on a SP-Sepharose column (Pharmacia). The column was washed with equilibration buffer (20 mM MES, pH 5.5) and Fab protein was eluted with a NaCl gradient in equilibration buffer. Residues 8-109 of human VEGF were expressed, refolded, and purified as previously described (Christinger, H. W., et al., (1996). Prot. Struct. Funct. Genet. 26, 353-357).

[0398] The complex between each Fab and the receptor-binding fragment of hVEGF was formed and purified, as described previously (Muller, Y. A., (1998), supra). The complex (in PBS, 25 mM EDTA) was concentrated to an optical density of A₂₈₀=10. Hanging-drop experiments were performed using the vapor-diffusion method with 10 ul drops consisting of a 1:1 ratio of protein solution and reservoir solution. The reservoir solution for the YADSI complex was 0.2 M ammonium sulfate, 25% PEG 3350 (w/v), 0.1 M HEPES, pH 7.5. The reservoir solution for the YADS2 complex was 1.0 M lithium chloride, 10% PEG 6000 (w/v), 0.1 M MES, pH 6.0. After 1-2 weeks at 19° C., plate or spindle shaped crystals grew for the YADS1 or YADS2 complex, respectively.

[0399] Crystals were incubated in reservoir solution supplemented with 25% glycerol prior to flash freezing. A data set was collected from a single frozen crystal at the beam line 5.0.2 of the Advanced Light Source (Berkeley) for YADS1 and at the beam line 9.2 of the Stanford Synchrotron Radiation Laboratory (Stanford University) for YADS2. The data was processed using the programs DENZO and SCALEPACK (Otwinowski, Z. M., (1997) Methods Enzymol. 276:307-326). The structures were solved by molecular replacement using the program AMoRe (CCP4 (1994) Acta Cryst. D50:760-763) and the coordinates of a previously solved Fab-hVEGF complex (PDB entry 1BJ1). The structure was refined using the programs REFMAC (CCP4 (1994), supra). The models were manually adjusted using program O (Jomes, T. A., et al., (1991) Acta Crystallogra A 47 (Pt2):969-995). The following programs were used to calculate the surface areas of interaction RESAREA version 3.2: Aug. 5, 1993 and AREAIMOL version 3.2: Dec. 19, 1995. These programs are part of the CCP4 suite Collaborative Computational Project, Number 4. 1994 (“The CCP4 Suite: Programs for Protein Crystallography” Acta Cryst. D50, 760-763). The crystal structures of YADS1 and YADS2 in complex with hVEGF were solved and refined at 2.65 and 2.8 Å resolution, respectively (Table 11).

TABLE 11
Data collection and refinement statistics
for YADS1 and YADS2 hVEGF complexes.

| | | YADS 1 | YADS 2 |
|---|---|---|---|
| A. Unit | Space group | P2₁ | C222₁ |
| cell | a (Å) | 83.3 | 96.5 |
| | b (Å) | 112.5 | 149.6 |
| | c (Å) | 105.8 | 117.4 |
| | Beta (deg.) | 105.8 | |
| B. Diffrac- | Resolution (Å) | 50-2.6 (2.7-2.6)^{a} | 50-2.8 (2.9-2.8)^{a} |
| tion Data | No. of reflections | 156868 | 111731 |
| | No. of unique | 41828 | 20861 |
| | reflections | | |
| | R_{merge}^{b} | 0.066 (0.356)^{a} | 0.076 (0.399)^{a} |
| | Completeness (%) | 99.9 (99.1)^{a} | 97.3 (83.2)^{a} |
| C. Refine- | R_{work}^{c,} R_{free}^{c} | 0.212, 0.271 | 0.218, 0.254 |
| ment | No. of non-H atoms | 8104 | 4077 |
| | No. of waters | 110 | 0 |
| | rmsd bond length | 0.011 | 0.011 |
| | (Å) | | |
| | rmsd angles (deg.) | 1.2 | 1.3 |

^{a}Values for the outer resolution shell are given in parantheses.
^{b}R_{merge.} = Σₕₖₗ|Iₕₖₗ − <Iₕₖₗ>|)/Σₕₖₗ<Iₕₖₗ>, where Iₕₖₗ is the intensity of reflection hkl, and <Iₕₖₗ> is the average intensity of multiple observations.
^{c}R_{work} = Σ|Fₒ − F_{c}|/Σ Fₒ, where Fₒ and F_{c} are the observed and calculated structure factor amplitudes, respectively. R_{free} is the R factor for a randomly selected 5% of reflections which were not used in the refinement

[0400] The surface area of each residue of an anti-VEGF antibody that is buried in VEGF (Å²) is reported below together with the percentage of the total surface area of the residue that is buried. Also reported is the surface area of each residue of VEGF antibody that is buried in VEGF (Å²) is reported below together with the percentage of the total surface area of the residue that is buried. See values for YADS-1:VEGF and YADS-2:VEGF complexes below. In all cases, because VEGF is a dimer, the residue numbers of VEGF referring to monomer 1 (of the VEGF dimer) are 8-109 and residue numbers of VEGF referring to monomer 2 (of the VEGF dimer) are 1008-1109. The first column in each table below recites the residue numbers of the protein being examined (either VEGF or an anti-VEGF antibody) (e.g., for section (a) below, TYR A 45 refers to Y45, LYS A1016 refers to K16 of VEGF). The second column recites the buried surface of that residue (Å²). The third column recites the buried surface for that residue as a percentage of the surface area of the whole residue

[0401] (a) VEGF:YADS-1

TABLE 12
Residues of VEGF in contact with YADS-1

| Residue Nr | buried surface | buried surface in % |
|---|---|---|
| TYR A 45 | 8.00 | 20.51% of 39.00 |
| ILE A 46 | 36.00 | 37.89% of 95.00 |
| LYS A 48 | 14.00 | 20.90% of 67.00 |
| GLN A 79 | 31.00 | 81.58% of 38.00 |
| MET A 81 | 24.00 | 75.00% of 32.00 |
| ARG A 82 | 7.00 | 14.58% of 48.00 |
| ILE A 83 | 33.00 | 76.74% of 43.00 |
| LYS A 84 | 25.00 | 40.98% of 61.00 |
| PRO A 85 | 8.00 | 14.55% of 55.00 |
| HIS A 86 | 107.00 | 54.04% of 198.00 |
| GLN A 87 | 110.00 | 71.43% of 154.00 |
| GLY A 88 | 38.00 | 95.00% of 40.00 |
| GLN A 89 | 103.00 | 88.79% of 116.00 |
| HIS A 90 | 93.00 | 75.61% of 123.00 |
| ILE A 91 | 71.00 | 89.87% of 79.00 |
| GLY A 92 | 12.00 | 60.00% of 20.00 |
| GLU A 93 | 21.00 | 17.50% of 120.00 |
| LYS A1016 | 31.00 | 25.20% of 123.00 |
| PHE A1017 | 21.00 | 46.67% of 45.00 |
| MET A1018 | 14.00 | 10.14% of 138.00 |
| ASN A1062 | 10.00 | 28.57% of 35.00 |
| ASP A1063 | 6.00 | 6.38% of 94.00 |
| GLU A1064 | 89.00 | 49.17% of 181.00 |
| LYS A1107 | 0.00 | 0.00% of 165.00 |

CHAIN A DIFF-AREA: 912.0 (8.16% of 11170.0 total AREA for this chain)
TOTAL DIFF-AREA: 912.0 (8.16% of 11170.0 total AREA over all chains

[0402] (b) VEGF: YADS-2

TABLE 13
Residues of VEGF in contact with YADS-2

| Residue Nr | buried surface | buried surface in % |
|---|---|---|
| ILE A 46 | 6.00 | 8.82% of 68.00 |
| LYS A 48 | 39.00 | 60.94% of 64.00 |
| GLN A 79 | 17.00 | 45.95% of 37.00 |
| MET A 81 | 29.00 | 96.67% of 30.00 |
| ILE A 83 | 32.00 | 86.49% of 37.00 |
| PRO A 85 | 22.00 | 38.60% of 57.00 |
| HIS A 86 | 128.00 | 64.00% of 200.00 |
| GLN A 87 | 32.00 | 23.88% of 134.00 |
| GLY A 88 | 22.00 | 64.71% of 34.00 |
| GLN A 89 | 119.00 | 88.15% of 135.00 |
| HIS A 90 | 20.00 | 21.74% of 92.00 |
| ILE A 91 | 55.00 | 67.07% of 82.00 |
| LYS A1016 | 1.00 | 0.87% of 115.00 |
| PHE A1017 | 45.00 | 90.00% of 50.00 |
| MET A1018 | 47.00 | 40.52% of 116.00 |
| TYR A1021 | 7.00 | 8.97% of 78.00 |
| ASP A1063 | 27.00 | 36.49% of 74.00 |
| GLY A1065 | 6.00 | 13.33% of 45.00 |
| LEU A1066 | 32.00 | 55.17% of 58.00 |
| CYS A1104 | 3.00 | 12.50% of 24.00 |
| ARG A1105 | 7.00 | 5.65% of 124.00 |
| PRO A1106 | 29.00 | 37.66% of 77.00 |

CHAIN A DIFF-AREA: 725.0 (6.17% of 11744.0 total AREA for this chain).
TOTAL DIFF-AREA: 725.0 (6.17% of 11744.0 total AREA over all chains)

[0403] The residues having greater than 5 Å² buried surface area and/or greater than 5% buried were considered significantly contacted. These results help describe the regions in VEGF and the regions in the antibodies that contact one another. Together with functional data relating to the binding VEGF presented earlier, common features of the G6 series of antibodies YADS-2 and YADS-3 antibodies can be observed. The binding of antibodies such as Fab-12 and YADS-1 to VEGF resulted in the surface area of G88 being 100% and 95%, respectively, buried whereas the binding of G6, G6-23 and YADS-2 resulted in G88 being only 66% or less buried.

[0404] The Fab frameworks were essentially unchanged in comparison with the structure of the parental Fab4D5; the C_{α} atoms of the YADS1 and YADS2 frameworks superimposed with Fab4D5 with root mean square deviations (rmsd) of 0.87 and 0.55 Å, respectively. The Cα atoms of the hVEGF molecules in the two structures superimpose well onto each other with rmsds of 0.7 Å for 87 Cα positions. The largest deviation of 3.7 Å occurs at residue glutamic acid 64. The loop containing this residue has inherent flexibility as shown by Muller et al., supra.

[0405] In both complexes, antigen recognition was entirely mediated by contacts with the CDR loops. In terms of buried surface area, YADS1 used both the heavy (498 Å²) and light chain (407 Å²), whereas YADS2 used mostly the heavy chain (543 Å²) and a small contribution from the light chain (157 Å²). Notably, residues at randomized positions accounted for essentially all of the buried surface area (98% and 100% for YADS1 and YADS2, respectively), and furthermore, the buried surface area involved almost entirely side chain atoms (82% and 80% for YADS1 and YADS2, respectively). Thus, both Fabs bound to antigen through interactions that were almost entirely mediated by side chains located at positions that were randomized in the libraries.

[0406] On the hVEGF side, the structural epitopes for binding to YADS1 and YADS2 overlap with each other, and also, with the structural epitope for binding to domain 2 of the hVEGF receptor Flt-1 (Flt-1_{D2},). The YADS1 and YADS2 antibodies can inhibit binding of Flt to human VEGF in vitro (data not shown), and they are expected to inhibit binding of KDR to human VEGF too. Nonetheless, there are significant differences between the structural epitopes for the two Fabs. In particular, of the 11 residues that differ between human and murine VEGF, only residue 88 is in contact with the Fabs, but the interactions involving this residue explain the differing affinities of YADS1 and YADS2 for mVEGF. In the YADS2 complex, Gly88 is partially exposed to solvent, while in the YADS1 complex it is completely buried in the interface. Murine VEGF contains a larger serine residue at position 88; this substitution can be readily accommodated in the YADS2 complex, but in the YADS1 model, the introduction of a serine side chain at the buried Gly88 position would require major rearrangements for the complex to be preserved.

[0407] As described above, both Fabs bind to antigen through contacts almost exclusively involving side chains at varied sites. In total, the CDRs of YADS1 and YADS2 contain 66 residues derived from randomized codons, and these residues are almost equally distributed amongst the four amino acid types allowed in the library design. However, when we consider the subset of residues that make contact with antigen, there is a clear bias in that 16 tyrosines account for 50% of the contact residues. Indeed, all but two of the tyrosines selected in the CDRs of YADS1 and YADS2 make contact with antigen, and all told, tyrosines contribute 71% of the surface area buried upon complexation with hVEGF. Thus, essentially every selected tyrosine side chain is involved in directly mediating antigen recognition and the other selected amino acids apparently play auxiliary roles.

[0408] Despite the predominance of tyrosine in the synthetic antigen-binding sites, an examination of the heavy atom (non-hydrogen) content of buried surface areas reveals that the Fab-hVEGF interfaces are no more hydrophobic than the interface between hVEGF and Flt-1_{D2}. On the hVEGF side, the heavy atom composition of the buried surface area is very similar in all three cases, being composed predominantly of carbon but also containing significant proportions of nitrogen and oxygen. Within the buried surface areas of the Fabs, nitrogen atoms are almost entirely absent, because the side chains allowed in the libraries were composed entirely of carbon, oxygen and hydrogen. Nonetheless, both Fabs bury a large number of oxygen atoms upon binding to hVEGF, and in both cases, the proportion of the buried surface area contributed by carbon is considerably less than that contributed by carbon to the buried surface area of Flt-1_{D2}. Thus, the predominance of tyrosine in the synthetic CDRs does not produce highly hydrophobic Fab-antigen interfaces dominated by aromatic interactions. On the contrary, the tyrosine residues make specific contacts with a wide variety of residues on the hVEGF surface, and these interactions utilize both the side chain hydroxyl groups and aromatic rings.

[0409] Thus, we circumvented the complexity of the natural immune system by using precisely defined synthetic libraries, and as a result, we were able to investigate the special role that tyrosine plays in antigen-binding sites. We generated libraries with restricted diversities and displayed the diverse surfaces on a fixed scaffold formed by the framework regions and buried CDR residues. Our results dramatically demonstrate that, in the context of a suitable scaffold, the tyrosine side chain is capable of mediating most of the contacts necessary for high affinity antigen recognition. Thus, it seems very likely that the overabundance of tyrosine in natural antigen-binding sites is a consequence of the side chain being particularly well suited for making productive contacts with antigen.

[0410] This supposition is also consistent with the chemical nature of tyrosine. As noted previously, the tyrosine side chain is large enough to sweep out large volumes of space with only a few torsion angles, and it can form hydrogen bonds, hydrophobic interactions and attractive electrostatic interactions with positively charged groups (Zemlin, M., et al., (2003) J. Mol. Biol. 334:733-749). In addition, the uncharged tyrosine side chain avoids electrostatic repulsion effects, and its midrange hydrophilicity allows it to adapt favorably to both hydrophilic and hydrophobic environments (Zemlin, (2003), supra; Ivanov, I., et al., (2002) in The Antibodies, eds. Zanetti, M. & Capra, J. (Taylor & Fancis, London, New York), pp. 43-67; Mian, I. S., et al., (1991) J. Mol. Biol. 217:133-151).

[0411] We also observed that, while alanine and serine residues did not make many direct contacts with antigen, they allowed for space and conformational flexibility which may be crucial for appropriate positioning of the large tyrosine side chains. Thus, these small residues may serve an auxiliary function in facilitating productive contacts between tyrosine and antigen. It is worth noting that, perhaps not coincidentally, serine is also highly abundant in natural antigen-binding sites (Mian, (1991), supra). Finally, the paucity of antigen contacts mediated by aspartate suggests that it may be possible to further minimize the chemical diversity of these synthetic antigen-binding sites.

### Example 8

### Anti-VEGF Antibodies from YADS-A and YADS-B Libraries

[0412] (a) Construction of Phage-Displayed Fab Libraries YADS-A and YADS-B

[0413] Two phage displayed libraries (YADS-A and YADS-B) were constructed, as generally described in Example 6, with a previously described phagemid designed to display bivalent Fab moieties dimerized by a leucine zipper domain inserted between the Fab heavy chain and the C-terminal domain of the gene-3 minor coat protein (P3C), except that the following positions of 4D5 were randomized were randomized as follows:

| | Randomized Positions | | |
|---|---|---|---|
| Library | CDRH1 | CDRH2 | CDRH3 |
| YADS-A | 28, 30, 31, 32, 33 | 50, 52, 53, 54, | 95, 96, 97, 98, 99, |
| | | 56, 58 | 100, 100a |
| YADS-B | 28, 30, 31, 32, 33 | 50, 52, 53, 54, | 95, 96, 97, 98, 99, |
| | | 56, 58 | 100, 100a |

[0414] For library YADS-A, two separate mutagenesis reactions were performed. In the first reaction, diversity was introduced into CDR-H1, CDR H2 and CDR-H3 with oligonucleotides YADS-H1, YADS-H2 and YADS-H3-7, respectively. This resulted in the introduction of degenerate codons that encoded for the four amino acids tyrosine, alanine, aspartate, and serine (YADS). In the second reaction, diversity was introduced into CDR-H1, CDR H2 and CDR-H3 with oligonucleotides YTNS-H1, YTNS-H2 and YTNS-H3-7, respectively. This resulted in the introduction of degenerate codons that encoded for the four amino acids tyrosine, threonine, asparagine, and serine (YTNS). The two reactions were pooled.

[0415] For library YADS-B, 13 separate mutagenesis reactions were peformed. The reactions resulted in the introduction of degenerate codons that encoded for the four amino acids tyrosine, alanine, aspartate, and serine (YADS). In each reaction, diversity was introduced into CDR-H1 and CDR-H2 with oligonucleotides YADS-H1 and YADS-H2. For each reaction, one of the following oligonucleotides was used to introduce diversity into CDR-H3: YADS-H3-3, YADS-H3-4, YADS-H3-5, YADS-H3-6, YADS-H3-7, YADS-H3-8, YADS-H3-9, YADS-H3-10, YADS-H3-11, YADS-H3-12, YADS-H3-13, YADS-H3-14, or YADS-H3-15. The 13 reactions were pooled.

[0416] For both libraries, the pooled mutagenesis reactions were electroporated in E. coli SS320 (Sidhu et al., supra). The transformed cells were grown overnight in the presence of M13-KO7 helper phage (New England Biolabs, Beverly, Mass.) to produce phage particles that encapsulated the phagemid DNA and displayed Fab fragments on their surfaces. The size of libraries YADS-A and YADS-B were both 7×10⁹.

[0417] (b) Selection of Anti-hVEGF Specific Antibodies from YADS-A and YADS-B Naïve Libraries.

[0418] Phage from library YADS-A and YADS-B were cycled seperately through rounds of binding selection to enrich for clones binding to h-VEGF. The binding selections were conducted using previously described methods (Sidhu et al., supra).

[0419] NUNC 96-well Maxisorp immunoplates were coated overnight at 4° C. with capture target (5 μg/mL) and blocked for 2 h with BSA (Sigma). After overnight growth at 37° C., phage were concentrated by precipitation with PEG/NaCl and resuspended in PBS, 0.5% BSA, 0.05% Tween 20 (Sigma), as described previously (Sidhu et al., supra). Phage solutions (˜10¹² phage/mL) were added to the coated immunoplates. Following a 2 h incubation to allow for phage binding, the plates were washed 10 times with PBS, 0.05% Tween20. Bound phages were eluted with 0.1 M HCl for 10 min and the eluant was neutralized with 1.0 M Tris base. Eluted phage were amplified in E. coli XL1-blue and used for further rounds of selection.

[0420] The libraries were subjected to 4 rounds of selection against each target protein. Individual clones from each round were grown in a 96-well format in 500 μL of 2YT broth supplemented with carbenicillin and M13-VCS, and the culture supernatants were used directly in phage ELISAs (Sidhu et al., supra) to detect phage-displayed Fabs that bound to plates coated with target protein but not to plates coated with BSA. A clone was considered to be a specific binder if the ELISA signal on target coated plates was at least 20 times greater than that on BSA coated plates.

[0421] Specific binders were sequenced, and the sequences of unique clones are shown in FIGS. 37 and 38 for libraries YADS-A and YADS-B, respectively. Sequences from FIG. 37 were obtained by sorting with human VEGF8-109. Sequences from FIG. 38 were obtained by sorting with murine VEGF.

### Example 9

### NNK Variants OF YADS2

[0422] (a) Construction of Phage-Displayed Fab Libraries by Randomizing Selected Positions of the YADS2 Anti-VEGF Antibody with the NNK Codon

[0423] Phage-displayed Fab libraries were constructed using a phagemid vector that resulted in the display of bivalent Fab moieties dimerized by a leucine zipper domain inserted between the Fab heavy chain and the C-terminal domain of the gene-3 minor coat protein (P3C). This vector comprised the YADS2 sequence. The humanized antibody YADS2 variable domains were expressed under the control of the IPTG-inducible Ptac promoter.

[0424] Library NNK was constructed with randomized residues in the heavy chain CDR-3 of YADS2. The specific residues that were randomized are 50, 95, 97, 99, 100, and 100a of the heavy chain.

[0425] At each of the randomized positions, the wild-type codon was replaced by a degenerate NNK codon (N=A/T/G/C, K=G/T in an equimolar ratio) that encoded for all 20 natural amino acids.

[0426] Libraries were constructed using the method of Kunkel (Kunkel, T. A., Roberts, J. D. & Zakour, R. A., Methods Enzymol. (1987), 154, 367-382) with previously described methods (Sidhu, S. S., Lowman, H. B., Cunningham, B. C. & Wells, J. A., Methods Enzymol. (2000), 328, 333-363). A unique “stop template” version of the Fab display vector was used to generate the NNK library. We used a template phagemid bearing the gene coding for YADS2 fab with TAA stop codons inserted at positions 30, 33, 52, 54, 56, 57, 60, 102, 103, 104, 107, 108 of the heavy chain. Mutagenic oligonucleotides with degenerate NNK codons at the positions to be diversified were used to simultaneously introduce CDR diversity and repair the stop codons. Diversity was introduced into CDR-H3 with the oligonucleotide named NNK-H1 (GCA GCT TCT GGC TTC GCT ATT TAT GAT TAT GAT ATA CAC TGG GTG CGT), NNK-H2 (CTG GAA TGG GTT GCA NNK ATT GCT CCA TAT GCT GGT GCT ACT GCT TAT GCC GAT AGC GTC) and NNK-H3 GTC TAT TAT TGT AGC CGC NNK TCT NNK GCT NNK NNK NNK GCT ATG GAC TAC TGG). The mutagenic oligonucleotides for all three heavy chain CDRs were incorporated simultaneously in a single mutagenesis reaction, so that so that simultaneous incorporation of the mutagenic oligonucleotide resulted in the introduction of the designed diversity at each position and simultaneously repaired all the TAA stop codons, thus generating an open reading frame that encoded a Fab library member fused to a homodimerizing leucine zipper and P3C. Note that the oligonucleotide NNK-H1 does not contain any degenerate codon and is added to the mutagenesis reaction to repair the TAA stop codons and introduce the wild type YADS2 sequence.

[0427] The mutagenesis reactions were electroporated into E. coli SS320 (Sidhu et al., supra), and the transformed cells were grown overnight in the presence of M13-KO7 helper phage (New England Biolabs, Beverly, Mass.) to produce phage particles that encapsulated the phagemid DNA and displayed Fab fragments on their surfaces. Each library contained greater than 5×10⁹ unique members.

[0428] (b) Selection of Specific Anti-VEGF Antibodies from the NNK Library

[0429] Phage from library NNK were cycled through rounds of binding selection to enrich for clones binding to human VEGF. The binding selections were conducted using previously described methods (Sidhu et al., supra).

[0430] NUNC 96-well Maxisorp immunoplates were coated overnight at 4° C. with capture target (5 □g/mL) and blocked for 2 h with Superblock TBS (tris-buffered saline) (Pierce). After overnight growth at 37° C., phage were concentrated by precipitation with PEG/NaCl and resuspended in Superblock TBS, 0.05% Tween 20 (Sigma), as described previously (Sidhu et al., supra). Phage solutions (˜10¹² phage/mL) were added to the coated immunoplates. Following a 2 h incubation to allow for phage binding, the plates were washed 10 times with PBS, 0.05% Tween 20. Bound phage were eluted with 0.1 M HCl for 10 min and the eluant was neutralized with 1.0 M Tris base. Eluted phage were amplified in E. coli XL1-blue and used for further rounds of selection.

[0431] The libraries were subjected to 5 rounds of selection against VEGF. Individual clones from each round of selection were grown in a 96-well format in 500 □L of 2YT broth supplemented with carbenicillin and M13-VCS, and the culture supernatants were used directly in phage ELISAs (Sidhu et al., supra) to detect phage-displayed Fabs that bound to plates coated with target protein but not to plates coated with BSA. Specific binders were defined as those phage clones that exhibited an ELISA signal at least 15-fold greater on target-coated plates in comparison with BSA-coated plates. Individual clones were screened after 3 to 5 rounds of selection for VEGF binding.

[0432] Individual clones representing specific binders were subjected to DNA sequence analysis, and the sequences of the randomized CDR positions are shown in FIG. 40. The affinity of the different YADS variants was estimated by using a “two point competitive phage ELISA”. The three best clones were produced as soluble Fab and were tested for their affinity with respect to hVEGF. BIAcore data was obtained according to Chen et al., J Mol Biol. (1999), 293(4):865-81. Briefly, binding affinities were calculated from association and dissociation rate constants measured using a BIAcore™-3000 surface plasmon resonance system (BIAcore, Inc., Piscataway, N.J.). A biosensor chip was activated for covalent coupling of VEGF using N-ethyl-N′-(3-dimethylaminopropyl)-carbodiimide hydrochloride (EDC) and N-hydroxysuccinimide (NHS) according to the supplier's (BIAcore, Inc., Piscataway, N.J.) instructions. hVEGF or mVEGF was buffer-exchanged into 10 mM sodium acetate, pH 4.8 and diluted to approximately 30 mg/ml. Aliquots of VEGF were injected at a flow rate of 2 microL/minute to achieve approximately 200-300 response units (RU) of coupled protein. A solution of 1 M ethanolamine was injected as a blocking agent. For kinetics measurements, twofold serial dilutions of Fab were injected in PBS/Tween buffer (0.05% Tween20 in phosphate-buffered saline) at 25° C. at a flow rate of 10 microL/minute. Equilibrium dissociation constants, Kd values from surface plasmon resonance measurements were calculated as k_{off}/kₒₙ. The BIAcore™ data is summarized as follows:

| Clone Name | hVEGF (nM) | mVEGF (nM) |
|---|---|---|
| NNK-1 | 0.60 | 0.24 |
| NNK-2 | 2.0 | 13 |
| NNK-3 | 6.0 | |

### Example 10

### Binomial Diversity Libraries

[0433] (a) Construction of Phage-Displayed Fab Libraries with CDR Residues Randomized as Only Tyr or Ser

[0434] Phage-displayed Fab libraries were constructed using a phagemid vector that resulted in the display of bivalent Fab moieties dimerized by a leucine zipper domain inserted between the Fab heavy chain and the C-terminal domain of the gene-3 minor coat protein (P3C). This vector comprises the humanized antibody 4D5 variable domains under the control of the IPTG-inducible Ptac promoter as described above. The humanized antibody 4D5 is an antibody which has mostly human consensus sequence framework regions in the heavy and light chains, and CDR regions from a mouse monoclonal antibody specific for Her-2. The method of making the anti-Her-2 antibody and the identity of the variable domain sequences are provided in U.S. Pat. Nos. 5,821,337 and 6,054,297.

[0435] Two libraries were constructed. Library YS-A was constructed with randomized residues in all three heavy chain CDRs, while Library YS-B was constructed with randomized residues in all three heavy chain CDRs and light chain CDR3. The specific residues that were randomized are shown below.

| | Randomized Positions | | | |
|---|---|---|---|---|
| Library | CDRL3 | CDRH1 | CDRH2 | CDRH3 |
| YS-A | | 28, 30, 31, | 50, 52, 53, | 95, 96, 97, 98, |
| | | 32, 33 | 54, 56, 58 | 99, 100, 100a |
| YS-B | 91-94, 96 | 28, 30, 31, | 50, 52, 53, | 95, 96, 97, 98, |
| | | 32, 33 | 54, 56, 58 | 99, 100, 100a |

[0436] At each of the randomized positions, the wild-type codon was replaced by a degenerate TMT codon (M=A/C in an equimolar ratio) that encoded for Tyr and Ser in an equimolar ratio. In addition, the length of CDRH3 was varied by using oligonucleotides that replaced the 7 wild-type codons between positions 101 to 107 with varying numbers of TMT codons (7 to 20 for Library YS-A and 7 to 15 for Library YS-B). In addition, the CDRL3 of Library YS-B was randomized so that 50% of the library members contained a deletion at position number 91 while the other 50% contained the wildtype Gln residue at this position.

[0437] Libraries were constructed using the method of Kunkel (Kunkel, T. A., Roberts, J. D. & Zakour, R. A., Methods Enzymol. (1987), 154, 367-382) with previously described methods (Sidhu, S. S., Lowman, H. B., Cunningham, B. C. & Wells, J. A., Methods Enzymol. (2000), 328, 333-363). A unique “stop template” version of the Fab display vector was used to generate both libraries YS-A and YS-B. We used a template phagemid designated pV0350-4 with TAA stop codons inserted at positions 30, 33, 52, 54, 56, 57, 60, 102, 103, 104, 107, 108 of the heavy chain. No stops were introduced in the light chain CDR3. Mutagenic oligonucleotides with degenerate TMT codons at the positions to be diversified were used to simultaneously introduce CDR diversity and repair the stop codons. For both libraries, diversity was introduced into CDR-H1 and CDR-H2 with oligonucleotides H1 and H2, respectively. For Library YS-A, diversity was introduced into CDR-H3 with an equimolar mixture of oligonucleotides. For library YS-B, diversity was introduced into CDR-H3 with an equimolar mixture of oligonucleotides. For library YS-B, diversity was introduced into CDR-L3 with an equimolar mixture of oligonucleotides. The mutagenic oligonucleotides for all CDRs to be randomized were incorporated simultaneously in a single mutagenesis reaction, so that simultaneous incorporation of all the mutagenic oligonucleotides resulted in the introduction of the designed diversity at each position and simultaneously repaired all the TAA stop codons, thus generating an open reading frame that encoded a Fab library member fused to a homodimerizing leucine zipper and P3C.

[0438] The mutagenesis reactions were electroporated into E. coli SS320 (Sidhu et al., supra), and the transformed cells were grown overnight in the presence of M13-KO7 helper phage (New England Biolabs, Beverly, Mass.) to produce phage particles that encapsulated the phagemid DNA and displayed Fab fragments on their surfaces. Each library contained greater than 5×10⁹ unique members.

[0439] (b) Selection of Specific Antibodies from the Naïve libraries YS-A and YS-B

[0440] Phage from library YS-A or YS-B were cycled through rounds of binding selection to enrich for clones binding to targets of interest. Target proteins, human VEGFs₈₋₁₀₉ and murine VEGF were analyzed separately with each library. The binding selections were conducted using previously described methods (Sidhu et al., supra).

[0441] NUNC 96-well Maxisorp immunoplates were coated overnight at 4° C. with capture target (5 □g/mL) and blocked for 2 h with Superblock TBS (tris-buffered saline) (Pierce). After overnight growth at 37° C., phage were concentrated by precipitation with PEG/NaCl and resuspended in Superblock TBS, 0.05% Tween 20 (Sigma), as described previously (Sidhu et al., supra). Phage solutions (˜10¹² phage/mL) were added to the coated immunoplates. Following a 2 h incubation to allow for phage binding, the plates were washed 10 times with PBS, 0.05% Tween 20. Bound phage were eluted with 0.1 M HCl for 10 min and the eluant was neutralized with 1.0 M Tris base. Eluted phage were amplified in E. coli XL1-blue and used for further rounds of selection.

[0442] The libraries were subjected to 5 rounds of selection against each target protein, and at each round, titers were obtained for phage binding to either the target protein or blank wells coated with Superblock TBS. The titer of phage bound to target-coated wells divided by the titer of phage bound to the blank wells was defined as an enrichment ratio used to quantify specific binding of phage pools to the target protein; larger enrichment ratios indicate higher specific binding. The enrichment ratios were observed after 3, 4, or 5 rounds of selection.

[0443] Individual clones from each round of selection were grown in a 96-well format in 5000L of 2YT broth supplemented with carbenicillin and M13-VCS, and the culture supernatants were used directly in phage ELISAs (Sidhu et al., supra) to detect phage-displayed Fabs that bound to plates coated with target protein but not to plates coated with BSA. Specific binders were defined as those phage clones that exhibited an ELISA signal at least 15-fold greater on target-coated plates in comparison with BSA-coated plates. Individual clones were screened after 2 rounds of selection for binding to human VEGF or after 5 rounds of selection for the other target proteins. These data were used to calculate the percentage of specific binders, and the results for each library against each target protein. Each library produced binders against each target protein.

[0444] Individual clones representing specific binders were subjected to DNA sequence analysis, and the sequences of the randomized CDR positions are shown in FIG. 41. It can be seen that, for each target protein, it was possible to select specific binders that contained only Tyr or Ser at the randomized positions (although some non-designed mutations were observed, which were likely created during library construction probably due to impurities in the oligonucleotides). Furthermore, the sequences of specific binders were unique to the target protein against which they were selected.

[0445] Two of the binders listed in FIG. 41 (hVEGF binder #3 and #18) were tested for their affinity with respect to hVEGF and mVEGF. BIAcore data was obtained according to Chen et al., J Mol Biol. (1999), 293(4):865-81. Briefly, binding affinities of hVEGF binder #3 and #18 for hVEGF and mVEGF were calculated from association and dissociation rate constants measured using a BIAcore™-2000 surface plasmon resonance system (BIAcore, Inc., Piscataway, N.J.). A biosensor chip was activated for covalent coupling of VEGF using N-ethyl-N′-(3-dimethylaminopropyl)-carbodiimide hydrochloride (EDC) and N-hydroxysuccinimide (NHS) according to the supplier's (BIAcore, Inc., Piscataway, N.J.) instructions. hVEGF or mVEGF was buffer-exchanged into 10 mM sodium acetate, pH 4.8 and diluted to approximately 30 mg/ml. Aliquots of VEGF were injected at a flow rate of 2 microL/minute to achieve approximately 200-300 response units (RU) of coupled protein. A solution of 1 M ethanolamine was injected as a blocking agent. For kinetics measurements, twofold serial dilutions of Fab were injected in PBS/Tween buffer (0.05% Tween20 in phosphate-buffered saline) at 25° C. at a flow rate of 10 microL/minute. Equilibrium dissociation constants, Kd values from surface plasmon resonance

| | hVEGF coated on | mVEGF coated |
|---|---|---|
| | the chip | on the chip |
| Clone #3 | | |
| kₐ (M⁻¹ · s⁻¹) (on-rate) | 1.6 × 10⁶ | Not detectable |
| k_{d} (s⁻¹) (off-rate) | 7 × 10⁻² | Not detectable |
| Kd | 46 +/− 17 nM | Not detectable |
| | | (>1 uM) |
| Clone #18 | | |
| kₐ (M⁻¹ · s⁻¹) (on-rate) | 1 × 10⁵ | 4 × 10⁴ |
| k_{d} (s⁻¹) (off-rate) | 8 × 10⁻³ | 2 × 10⁻² |
| Kd | 64 +/− 7 nM | 600 +/− 200 nM |

measurements were calculated as k_{off}/kₒₙ. The BIAcore™ data is summarized below

### Example 11

### Additional Anti-VEGF YS Antibodies

[0446] Library construction and sorting. A phagemid designed to display bivalent Fab4D5 on the surface of M13 bacteriophage was used to construct libraries, as described above. Oligonucleotide-directed mutagenesis was used to replace CDR positions with TMT degenerate codons, (M=A/C in equal proportions). The positions chosen for randomization were as follows:

Randomized Positions

| Library | CDRL3 | CDRH1 | CDRH2 | CDRH3 |
|---|---|---|---|---|
| YS-A | | 28, 30, 31, | 50, 52, 53, | 95-100 |
| | | 32, 33 | 54, 56, 58 | replaced |
| | | | | with 7-20 |
| | | | | residues |
| YS-B | 91-94, | 28, 30, 31, | 50, 52, 53, | 95-100a |
| | 96 | 32, 33 | 54, 56, 58 | replaced |
| | | | | with 7-15 |
| | | | | residues. |

.In CDR-H3, positions 95 through 100a were replaced with random loops of all possible lengths ranging from 7 to 20 residues (library A) or 7 to 15 residues (library B). Each library contained ˜10¹⁰ unique members, and thus, the actual library diversities were comparable to the maximum number of unique sequences encoded by the library designs (4×10⁹).

[0447] Phage from the libraries were cycled through rounds of binding selection with antigen immobilized on 96-well Maxisorp immunoplates (NUNC) as the capture target, as described previously (Sidhu, S. S., et al., (2000) Methods Enzymol. 328:333-363). After five rounds of selection, phage were produced from individual clones grown in a 96-well format and the culture supernatants were used in phage ELISAs to detect specific binding clones. Specific binding clones were determined to be Fab-phage that bound to the cognate antigen but did not exhibit detectable binding to seven other proteins.

[0448] Competitive phage ELISA. A modified phage ELISA was used to estimate the binding affinities of Fabs (Sidhu, (2000), supra; Deshayes, K., et al., (2002) Chem. Biol. 9:495-505). Phage ELISAs were carried out on plates coated with antigen, as described above. Phage displaying antibody fragments were serially diluted in PBS, 0.5% (w/v) BSA, 0.1% (v/v) Tween 20, and binding was measured to determine a phage concentration giving ˜50% of the signal at saturation. A fixed, sub-saturating concentration of phage was preincubated for 2 hours with serial dilutions of antigen and then transferred to assay plates coated with antigen. After 15 minutes incubation, the plates were washed with PBS, 0.05% Tween 20 and incubated 30 minutes with horseradish peroxidase/anti-M13 antibody conjugate (1:5000 dilution) (Pharmacia). The plates were washed, developed with TMB substrate (Kirkegaard and Perry Laboratories), quenched with 1.0 M H₃PO₄, and read spectrophotometrically at 450 nm. The binding affinities of the Fabs were determined as IC₅₀ values defined as the concentration of antigen that blocked 50% of the phage binding to the immobilized antigen. DNA sequencing of 184 binding clones revealed 63 unique sequences shown in FIG. 42. Interestingly, the clones from library B exhibit homology within the selected CDR-L3 and CDR-H3 sequences. In contrast, the CDR-H3 sequences of the clones from library A exhibit homology amongst themselves but are very different from the sequences from library B. Thus, it appears that the nature of the CDR-L3 sequence influenced the selection of CDR-H3 sequences, and as a result, two distinct classes of anti-hVEGF antibodies arose from the two different libraries. The clones were screened by competitive phage ELISA and exhibited IC₅₀ values ranging from approximately 60 nM to greater than 5 μM.

[0449] Protein purification and affinity analysis. The three anti-hVEGF clones with the highest estimated affinities (top three sequences in FIG. 42) were purified as free Fab proteins. Fab proteins were purified from E. coli as described previously (Muler, Y. A., et al., (1998) Structure 6:1153-1167). See FIG. 43 for YS1 Fab sequence. The binding kinetics of the purified Fabs (designated Fab-YS1, Fab-YS2 and Fab-YS3) were studied by surface plasmon resonance. Binding kinetics were determined by surface plasmon resonance using a BIAcoreυ-3000 with hVEGF immobilized on CM5 chips at ˜500 response units, as described previously (Chen, Y., et al., (1999) J. Mol. Biol. 293:865-881). Serial dilutions of Fab proteins were injected, and binding responses were corrected by subtraction of responses on a blank flow cell. For kinetic analysis, a 1:1 Langmuir model of global fittings of kₒₙ and k_{off} was used. The K_{d} values were determined from the ratios of kₒₙ and k_{off}.

| | YS1 | YS2 | YS3 |
|---|---|---|---|
| kₐ (10⁴ · M₋₁ · s⁻¹) | 5 ± 1 | 6 ± 1 | 5 ± 1 |
| kd (10⁻³ · s⁻¹) | 2.8 ± 0.1 | 11.7 ± 0.4 | 9.4 ± 0.1 |
| K_{D} (nM) | 60 ± 20 | 220 ± 60 | 190 ± 40 |

Fab-YS1 exhibited the highest affinity for hVEGF (K_{d}=60 nM), while the other two Fabs bound approximately 5-fold less tightly due to faster off rates. The sequences of Fab-YS1 and Fab-YS2 differ in only three positions, and thus, these three differences account for the improved affinity of Fab-YS1 in comparison with Fab-YS2.

[0450] Immunohistochemistry. We next investigated the specificity of Fab-YS1 by using the protein to visualize VEGF in mammalian cells transfected with a gene encoding for VEGF fused to green fluorescent protein (GFP). Human A673 cells expressing murine VEGF-GFP were stained and imaged, as described (Peden, A. A., et al., (2004) J. Cell. Biol. 164:1065-1076). In the plus VEGF panel, Fab-YS1 was pre-incubated for 5 minutes with a 5-fold excess of recombinant VEGF before being incubated with the cells. The immunohistochemical staining with Fab-YS1 precisely overlapped with the fluorescence signal from the VEGF-GFP fusion (data not shown). Furthermore, the signal was completely blocked by incubating Fab-YS1 with hVEGF prior to the staining.

[0451] Immunoprecipitation. We also conducted immunoprecipitations of endogenous hVEGF and compared the performance of Fab-YS1 to that of a highly specific, natural anti-hVEGF monoclonal antibody (A4.6.1) (Kim, K. J., et al., (1992) Growth Factors 7:53-64). A673 cells were metabolically labelled and immunoprecipitations were performed from the media, as described (Kim, K. J., et al., supra) using 15 ug of anti-GFP polyclonal antibody (Clontech), Fab-YS1 or monoclonal antibody A4.6.1. The immune complexes were eluted by boiling and resolved by SDS-PAGE on a 14% acrylamide gel under reducing conditions. The gel was dried and then exposed to a phosphoimager plate overnight. Both antibodies immunoprecipitated an identical set of bands that likely represent hVEGF variants generated by alternative mRNA splicing (data not shown). Taken together, these results show that Fab-YS1 binds to hVEGF with high affinity and specificity comparable to that of a natural antibody, even in the complex cellular milieu.

### Example 12

### In Vivo Activities of the Anti-VEGF Antibodies

[0452] G6-23 inhibits neonate mouse growth and survival. Newborn mice (C57/BL6) were intra-peritoneally (i.p.) injected daily at 1 day post-natally with G6-23 IgG (50 mg/kg) or Flt-1(1-3) Fc (50 mg/kg), or appropriate controls, gp120-Fc, PBS or no injection. The body weights were measured daily and the survival rate of the mice were counted. As shown in FIG. 10, G6-23 reduced body weight equal potently as mFlt-1(1-3)Fc, which is a known mVEGF antagonist. Moreover, mouse survival rates were also equivalent between the two groups. Significantly, the results of G6-23 specifically indicated that mVEGF is required for the growth and survival of new born mice, whereas the effect of Flt-1 (1-3) Fc is less specific since it is known to block not only mVEGF, but also placental growth factor (PIGF) and VEGF-B. G6-23 effectively inhibits the growth of xenograft tumors in nude mice. KM12 and SW480, two human colon-rectal cancer cell lines, were grown in cell culture first and about 10⁶ cells from each cell line were injected into host nude mice. When the tumor reached approximately 100 mm³ in size (1 week after injection), G6-23 or control were injected (10 mg/kg) twice weekly (six nude mice were used for each group). The tumor sizes were measured till day 13 after antibody injection. As shown in FIG. 11, G6-23 was significantly effective in reducing tumor volumes of both KM12 (left graph) and SW480 (right graph) cell lines.

[0453] Gene expressions for both hVEGF and mVEGF were examined in KM12 xenograft mice. Samples of tumors and surrounding tissues were extracted and Tagman was used to quantify the gene expression levels. In these xenograft models, hVEGF came from the implanted human KM12 tumor cells, whereas mVEGF came from surrounding host stromal cells. As shown in FIG. 12, samples from mice treated with G6-23 on day 3 and day 13 had higher gene expression levels for both hVEGF and mVEGF compared to the control groups. The results indicate that while mouse treated with G6-23 had reduced tumor growth and much decreased vascularity, expressions of both mVEGF and hVEGF were up-regulated in response to the reduction of angiogenesis. It also indicates that at the tumor site, there is significant infiltration of mouse stromal cells, which is a major source of VEGF for the tumor angiogenesis. Therefore, in a preclinical animal model such as the xenograft model described herein, an antibody capable of cross-reacting and blocking both hVEGF and mVEGF is necessary for studying its efficacy.

[0454] Mouse (Lewis) lung carcinoma (LL2) cells were also used in a nude mice model to test the inhibitory effect of G6-23. About 10⁶ cells LL2 cells in a matrigel formulation were administered subcutaneously in the flank of 5-week old beige nude mice. One group of six mice were then treated with G6-23 at 10 mg/kg, injected via i.p. twice weekly for a span of 19 days. Other control agents (i.e., mFlt(1-3)-IgG, rag-10) were also used to treat groups of six mice. As shown in FIG. 13, G6-23 significantly reduced the rate of tumor growth with a pharmacological effect comparable to that of mFlt(1-3)-IgG, which is known to be multi-potent in blocking not only mVEGF, but also other angiogenic factors mPIGF and mVEGF-B. Serum levels of bioactive G6-23 was also measured. The result indicates that its levels (62-121 ug/ml) are well within the expected range for a therapeutic neutralizing anti-VEGF antibody.

[0455] HM-7 cells (American Type Culture Collection) were also used to study the tumor growth inhibition in nude mice. G6 IgG antibody, G6-31 IgG antibody, the Avastin™ antibody, the Y0317 IgG antibody used in this study were expressed in and purified from CHO cells. HM-7 cells were maintained in culture with F12:DMEM medium, supplemented with 10% FBS and 1% penicillin-streptomycin and 1% Glutamine. Cells were grown at 37° C. in 5% CO₂ until confluence, harvested, counted, and washed and resuspended in sterile Metrigel at a concentration of 25×10⁶ cells per ml. Xenografts were established in 4- to 6-week-old female Beige Nude XID mice by injecting 5×10⁶ of HM-7 cultured cells into the dorsal flank of the mice and allowed to grow. After 48 hours, the tumors were palpable in all mice, and cohorts were randomly selected (n=10) to provide day-O controls. The remaining mice were divided into 23 groups and injected twice weekly with different anti-VEGF antibodies. The treatments for the study groups are as follows: Group A (n=10×1): mice treated with control antibody MAB (an anti-ragweed antibody) in 0.1 ml by interperitoneal injection twice/week with a high dose (5 mg/kg). Group B (n=10×5): mice treated with G6 IgG antibody in 0.1 ml by interperitoneal injection twice/week with the same dose (0.1, 0.25, 0.5, 2 or 5 mg/kg). Group C (n=10×5): mice treated with Y0317 IgG antibody in 0.1 ml by interperitoneal injection twice/week with the same dose (0.1, 0.25, 0.5, 2 or 5 mg/kg). Group D (n=10×5): mice treated with the Avastin™ antibody in 0.1 ml by interperitoneal injection twice/week with the same dose (0.1, 0.25, 0.5, 2 or 5 mg/kg). Group E (n=10×5): mice treated with G6-31 IgG antibody in 0.1 ml by interperitoneal injection twice/week with the same dose (0.1, 0.25, 0.5, 2 or 5 mg/kg). The mice (n=10 control and treated animals) were killed at day 4, 7, 11, 14, 17 and 21 after initiation of injections, and the tumors were excised and weighed.

[0456] The results show that there was a significant suppression of tumor growth when the G6, G6-31, Y0317 and the Avastin™ antibodies were administered (p<0.5) (FIGS. 33A-E). The excised tissues from the anti-VEGF antibody treated mice were smaller in size and less vascularized as compared to the tumors excised from the control mice. As discussed above, the G6 and the G6-23 antibody unlike the Avastin antibody and the Y0317 antibody can bind to both human VEGF and mouse VEGF, including mouse stromal VEGF which can be upregulated upon implantation of human colorectal tumors in mouse models. Direct comparison of the activity of the G6 and G6-31 antibodies, which antibodies bind similar epitopes, indicates that at most datapoints the antibody with the higher affinity for VEGF-A, the G6-31 antibody, had increased tumor growth inhibiting properties.

The application's sequence listing, which the Patent Office published only in electronic form, follows.

SEQUENCE LISTING (928 sequences)

SEQ ID NO: 1 - protein, 6 aa, Artificial
  CDR-H2
  MISC_FEATURE (2)..(2): Xaa is Ile, Val, or any other hydrophobic amino acid
  MISC_FEATURE (5)..(5): Xaa is any amino acid
GXTPXG

SEQ ID NO: 2 - protein, 5 aa, Artificial
  CDR-H1
  MISC_FEATURE (1)..(1): Xaa is any amino acid
  MISC_FEATURE (2)..(2): Xaa is Tyr or Phe
  MISC_FEATURE (3)..(3): Xaa is Trp or Leu
XXXIH

SEQ ID NO: 3 - DNA, 51 bp, Artificial
  Oligonucleotide
  misc_feature (22)..(22): k is independently g or t
  misc_feature (26)..(26): m is independently a or c
  misc_feature (28)..(28): k is independently g or t
  misc_feature (29)..(29): m is independently a or c
  misc_feature (31)..(31): k is independently g or t
  misc_feature (32)..(32): s is g or c
gcagcttctggcttcaccattkccgmtkmtksgatacactgggtgcgtcag

SEQ ID NO: 4 - DNA, 72 bp, Artificial
  Oligonucleotide
  misc_feature (23)..(23): s is g or c
  misc_feature (28)..(28): r is a or g
  misc_feature (35)..(35): s is independently g or c
  misc_feature (38)..(38): s is independently g or c
  misc_feature (43)..(43): k is independently g or t
  misc_feature (44)..(44): m is a or c
  misc_feature (49)..(49): k is independently g or t
  misc_feature (50)..(50): m is a or c
aagggcctggaatgggttgcagstattrctcctgstgstggtkmtactkmttatgccgatagcgtcaagggc

SEQ ID NO: 5 - DNA, 66 bp, Artificial
  Oligonucleotide
  misc_feature (25)..(25): k is independently g or t
  misc_feature (26)..(26): y is independently c or t
  misc_feature (29)..(29): y is independently c or t
  misc_feature (31)..(31): k is independently g or t
  misc_feature (32)..(32): y is independently c or t
  misc_feature (34)..(34): k is independently g or t
  misc_feature (35)..(35): y is independently c or t
  misc_feature (37)..(37): s is independently g or c
  misc_feature (38)..(38): y is independently c or t
  misc_feature (40)..(40): s is independently g or c
  misc_feature (43)..(43): k is independently g or t
  misc_feature (44)..(44): m is a or c
actgccgtctattattgtgcacgckytgytkytkytsytscakmtgctatggactactggggtcaa

SEQ ID NO: 6 - DNA, 55 bp, Artificial
  Oligonucleotide
  misc_feature (16)..(16): s is independently g or c
  misc_feature (17)..(17): m is independently a or c
  misc_feature (20)..(20): m is independently a or c
  misc_feature (23)..(23): y is c or t
  misc_feature (25)..(25): k is g or t
  misc_feature (28)..(28): r is a or g
  misc_feature (32)..(32): s is independently g or c
acctgccgtgccagtsmagmtgytkccrctgstgtagcctggtatcaacagaaac

SEQ ID NO: 7 - DNA, 54 bp, Artificial
  Oligonucleotide
  misc_feature (16)..(16): k is independently g or t
  misc_feature (17)..(17): m is independently a or c
  misc_feature (19)..(19): k is independently g or t
  misc_feature (28)..(28): k is independently g or t
  misc_feature (29)..(29): y is c or t
  misc_feature (34)..(34): k is independently g or t
  misc_feature (35)..(35): m is independently a or c
ccgaagcttctgattkmtkccgcatcckytctckmttctggagtcccttctcgc

SEQ ID NO: 8 - DNA, 57 bp, Artificial
  Oligonucleotide
  misc_feature (16)..(16): s is independently g or c
  misc_feature (17)..(17): m is independently a or c
  misc_feature (22)..(22): k is independently g or t
  misc_feature (25)..(25): k is independently g or t
  misc_feature (26)..(26): m is independently a or c
  misc_feature (28)..(28): r is independently a or g
  misc_feature (31)..(31): r is independently a or g
  misc_feature (37)..(37): s is independently g or c
gcaacttattactgtsmacaakcckmtrctrctcctscaacgttcggacagggtacc

SEQ ID NO: 9 - DNA, 57 bp, Artificial
  Oligonucleotide
  misc_feature (16)..(16): r is independently a or g
  misc_feature (17)..(17): m is independently a or c
  misc_feature (23)..(23): s is independently g or c
  misc_feature (25)..(25): k is independently g or t
  misc_feature (26)..(26): m is independently a or c
  misc_feature (29)..(29): s is independently g or c
  misc_feature (31)..(31): r is independently a or g
  misc_feature (32)..(32): m is independently a or c
  misc_feature (37)..(37): k is independently g or t
  misc_feature (38)..(38): s is independently g or c
gcaacttattactgtrmacaagstkmtgstrmccctksgacgttcggacagggtacc

SEQ ID NO: 10 - DNA, 51 bp, Artificial
  Oligonucelotide
  misc_feature (22)..(22): k is independently g or t
  misc_feature (27)..(27): m is a or c
  misc_feature (29)..(29): w is a or t
  misc_feature (31)..(31): y is c or t
  misc_feature (32)..(32): k is independently g or t
gcagcttctggcttcaccattkccgamtwcykgatacactgggtgcgtcag

SEQ ID NO: 11 - DNA, 72 bp, Artificial
  Oligonucleotide
  misc_feature (23)..(23): s is independently g or c
  misc_feature (25)..(25): r is a or g
  misc_feature (29)..(29): s is independently g or c
  misc_feature (31)..(31): s is independently g or c
  misc_feature (34)..(34): k is g or t
  misc_feature (38)..(38): s is independently g or c
  misc_feature (41)..(41): s is independently g or c
  misc_feature (44)..(44): w is independently a or t
  misc_feature (47)..(47): s is independently g or c
  misc_feature (50)..(50): w is independently a or t
aagggcctggaatgggttgcagstrttascscakctgstgsttwcasctwctatgccgatagcgtcaagggc

SEQ ID NO: 12 - DNA, 66 bp, Artificial
  Oligonucleotide
  misc_feature (26)..(26): w is independently a or t
  misc_feature (28)..(28): r is a or g
  misc_feature (32)..(32): w is independently a or t
  misc_feature (35)..(35): w is independently a or t
  misc_feature (37)..(37): m is a or c
  misc_feature (40)..(40): s is g or c
  misc_feature (44)..(44): w is independently a or t
actgccgtctattattgtgcacgctwcrtttwctwcmtcscatwcgctatggactactggggtcaa

SEQ ID NO: 13 - DNA, 55 bp, Artificial
  Oligonucleotide
  misc_feature (16)..(16): s is independently g or c
  misc_feature (21)..(21): m is a or c
  misc_feature (22)..(22): r is a or g
  misc_feature (25)..(25): k is independently g or t
  misc_feature (29)..(29): s is independently g or c
  misc_feature (31)..(31): k is independently g or t
acctgccgtgccagtsaagamrttkccasckctgtagcctggtatcaacagaaac

SEQ ID NO: 14 - DNA, 54 bp, Artificial
  Oligonucleotide
  misc_feature (17)..(17): w is independently a or t
  misc_feature (19)..(19): k is g or t
  misc_feature (29)..(29): w is independently a or t
  misc_feature (35)..(35): w is independently a or t
ccgaagcttctgatttwckccgcatcctwcctctwctctggagtcccttctcgc

SEQ ID NO: 15 - DNA, 57 bp, Artificial
  Oligonucleotide
  misc_feature (16)..(16): v is independently a, c, or g
  misc_feature (18)..(18): r is independently a or g
  misc_feature (19)..(19): v is independently a, c, or g
  misc_feature (21)..(21): r is independently a or g
  misc_feature (22)..(22): k is g or t
  misc_feature (26)..(26): w is a or t
  misc_feature (29)..(29): s is independently g or c
  misc_feature (32)..(32): s is independently g or c
  misc_feature (37)..(37): s is independently g or c
gcaacttattactgtvarvarkcctwcascasccctscaacgttcggacagggtacc

SEQ ID NO: 16 - DNA, 57 bp, Artificial
  Oligonucleotide
  misc_feature (16)..(16): v is independently a, c, or g
  misc_feature (18)..(18): r is independently a or g
  misc_feature (19)..(19): v is independently a, c, or g
  misc_feature (21)..(21): r is independently a or g
  misc_feature (23)..(23): s is g or c
  misc_feature (26)..(26): w is a or t
  misc_feature (28)..(28): k is independently g or t
  misc_feature (31)..(31): r is independently a or g
  misc_feature (38)..(38): k is independently g or t
gcaacttattactgtvarvargsttwckctracccttkgacgttcggacagggtacc

SEQ ID NO: 17 - protein, 14 aa, Artificial
  Epitope tag
MADPNRFRGKDLGG

SEQ ID NO: 18 - protein, 35 aa, Artificial
  Leucine zipper
GRMKQLEDKVEELLSKNYHLENEVARLKKLVGERG

SEQ ID NO: 19 - protein, 214 aa, Artificial
  YADS1 Fab light chain
DIQMTQSPSSLSASVGDRVTITCRASQSYAYAVAWYQQKPGKAPKLLIYDASYLYSGVPSRFSGSGSGTDFTLTISSLQPEDFATYYCQQSYYSPYTFGQGTKVEIKRTVAAPSVFIFPPSDEQLKSGTASVVCLLNNFYPREAKVQWKVDNALQSGNSQESVTEQDSKDSTYSLSSTLTLSKADYEKHKVYACEVTHQGLSSPVTKSFNRGEC

SEQ ID NO: 20 - protein, 232 aa, Artificial
  YADS1 Fab heavy chain
EVQLVESGGGLVQPGGSLRLSCAASGFSISSSSIHWVRQAPGKGLEWVAYISPSSGSTSYADSVKGRFTISADTSKNTAYLQMNSLRAEDTAVYYCSRYYSSSYYYSYYYAMDYWGQGTLVTVSSASTKGPSVFPLAPSSKSTSGGTAALGCLVKDYFPEPVTVSWNSGALTSGVHTFPAVLQSSGLYSLSSVVTVPSSSLGTQTYICNVNHKPSNTKVDKKVEPKSCDKTH

SEQ ID NO: 21 - protein, 214 aa, Artificial
  YADS2 Fab light chain
DIQMTQSPSSLSASVGDRVTITCRASQSYAYAVAWYQQKPGKAPKLLIYDASYLYSGVPSRFSGSGSGTDFTLTISSLQPEDFATYYCQQAYSSPDTFGQGTKVEIKRTVAAPSVFIFPPSDEQLKSGTASVVCLLNNFYPREAKVQWKVDNALQSGNSQESVTEQDSKDSTYSLSSTLTLSKADYEKHKVYACEVTHQGLSSPVTKSFNRGEC

SEQ ID NO: 22 - protein, 250 aa, Artificial
  YADS2 Fab heavy chain
MKKNIAFLLASMFVFSIATNAYAEVQLVESGGGLVQPGGSLRLSCAASGFAISDYDIHWVRQAPGKGLEWVADIAPYAGATAYADSVKGRFTISADTSKNTAYLQMNSLRAEDTAVYYCSRSSYAYYAAMDYWGQGTLVTVSSASTKGPSVFPLAPSSKSTSGGTAALGCLVKDYFPEPVTVSWNSGALTSGVHTFPAVLQSSGLYSLSSVVTVPSSSLGTQTYICNVNHKPSNTKVDKKVEPKSCDKTH

SEQ ID NO: 23 - protein, 214 aa, Artificial
  YADS3 Fab light chain
DIQMTQSPSSLSASVGDRVTITCRASQASYYDVAWYQQKPGKAPKLLIYAASYLYSGVPSRFSGSGSGTDFTLTISSLQPEDFATYYCQQYYYAPATFGQGTKVEIKRTVAAPSVFIFPPSDEQLKSGTASVVCLLNNFYPREAKVQWKVDNALQSGNSQESVTEQDSKDSTYSLSSTLTLSKADYEKHKVYACEVTHQGLSSPVTKSFNRGEC

SEQ ID NO: 24 - protein, 250 aa, Artificial
  YADS3 Fab heavy chain
MKKNIAFLLASMFVFSIATNAYAEVQLVESGGGLVQPGGSLRLSCAASGFSISDYDIHWVRQAPGKGLEWVAAIAPYSGSTYYADSVKGRFTISADTSKNTAYLQMNSLRAEDTAVYYCSRSSYAYYSAMDYWGQGTLVTVSSASTKGPSVFPLAPSSKSTSGGTAALGCLVKDYFPEPVTVSWNSGALTSGVHTFPAVLQSSGLYSLSSVVTVPSSSLGTQTYICNVNHKPSNTKVDKKVEPKSCDKTH

SEQ ID NO: 25 - DNA, 48 bp, Artificial
  Oligonucleotide
gcagcttctggcttcgctatttatgattatgatatacactgggtgcgt

SEQ ID NO: 26 - DNA, 60 bp, Artificial
  Oligonucleotide
  misc_feature (16)..(17): n is independently a, t, g, or c
  misc_feature (18)..(18): k is g or t
ctggaatgggttgcannkattgctccatatgctggtgctactgcttatgccgatagcgtc

SEQ ID NO: 27 - DNA, 54 bp, Artificial
  Oligonucleotide
  misc_feature (19)..(20): n is independently a, t, g, or c
  misc_feature (21)..(21): k is independently g or t
  misc_feature (25)..(26): n is independently a, t, g, or c
  misc_feature (27)..(27): k is independently g or t
  misc_feature (31)..(32): n is independently a, t, g, or c
  misc_feature (33)..(33): k is independently g or t
  misc_feature (34)..(35): n is independently a, t, g, or c
  misc_feature (36)..(36): k is independently g or t
  misc_feature (37)..(38): n is independently a, t, g, or c
  misc_feature (39)..(39): k is independently g or t
gtctattattgtagccgcnnktctnnkgctnnknnknnkgctatggactactgg

SEQ ID NO: 28 - protein, 214 aa, Artificial
  G6 Fab light chain
DIQMTQSPSSLSASVGDRVTITCRASQDVSTAVAWYQQKPGKAPKLLIYSASFLYSGVPSRFSGSGSGTDFTLTISSLQPEDFATYYCQQSYTTPPTFGQGTKVEIKRTVAAPSVFIFPPSDEQLKSGTASVVCLLNNFYPREAKVQWKVDNALQSGNSQESVTEQDSKDSTYSLSSTLTLSKADYEKHKVYACEVTHQGLSSPVTKSFNRGEC

SEQ ID NO: 29 - protein, 226 aa, Artificial
  G6 Fab heavy chain
EVQLVESGGGLVQPGGSLRLSCAASGFTISDYWIHWVRQAPGKGLEWVAGITPAGGYTYYADSVKGRFTISADTSKNTAYLQMNSLRAEDTAVYYCARFVFFLPYAMDYWGQGTLVTVSSASTKGPSVFPLAPSSKSTSGGTAALGCLVKDYFPEPVTVSWNSGALTSGVHTFPAVQSSGLYSLSSVVTVPSSSLGTQTYICNVNHKPSNTKVDKKVEPKSCDKTH

SEQ ID NO: 30 - protein, 214 aa, Artificial
  G6-23 Fab light chain
DIQMTQSPSSLSASVGDRVTITCRASQDVSTAVAWYQQKPGKAPKLLIYSASFLYSGVPSRFSGSGSGTDFTLTISSLQPEDFATYYCKQGYANPWTFGQGTKVEIKRTVAAPSVFIFPPSDEQLKSGTASVVCLLNNFYPREAKVQWKVDNALQSGNSQESVTEQDSKDSTYSLSSTLTLSKADYEKHKVYACEVTHQGLSSPVTKSFNRGEC

SEQ ID NO: 31 - protein, 227 aa, Artificial
  G6-23 Fab heavy chain
EVQLVESGGGLVQPGGSLRLSCAASGFTISDYWIHWVRQAPGKGLEWVAGITPAGGYTYYADSVKGRFTISADTSKNTAYLQMNSLRAEDTAVYYCARFVFFLPYAMDYWGQGTLVTVSSASTKGPSVFPLAPSSKSTSGGTAALGCLVKDYFPEPVTVSWNSGALTSGVHTFPAVLQSSGLYSLSSVVTVPSSSLGTQTYICNVNHKPSNTKVDKKVEPKSCDKTH

SEQ ID NO: 32 - protein, 214 aa, Artificial
  G6-31 Fab light chain
DIQMTQSPSSLSASVGDRVTITCRASQDVSTAVAWYQQKPGKAPKLLIYSASFLYSGVPSRFSGSGSGTDFTLTISSLQPEDFATYYCQQGYGNPFTFGQGTKVEIKRTVAAPSVFIFPPSDEQLKSGTASVVCLLNNFYPREAKVQWKVDNALQSGNSQESVTEQDSKDSTYSLSSTLTLSKADYEKHKVYACEVTHQGLSSPVTKSFNRGEC

SEQ ID NO: 33 - protein, 214 aa, Artificial
  G6-8 Fab light chain
DIQMTQSPSSLSASVGDRVTITCRASQDVSTAVAWYQQKPGKAPKLLIYSASFLYSGVPSRFSGSGSGTDFTLTISSLQPEDFATYYCQQGAGSPLTFGQGTKVEIKRTVAAPSVFIFPPSDEQLKSGTASVVCLLNNFYPREAKVQWKVDNALQSGNSQESVTEQDSKDSTYSLSSTLTLSKADYEKHKVYACEVTHQGLSSPVTKSFNRGEC

SEQ ID NO: 34 - protein, 214 aa, Artificial
  G6-23.1 Fab light chain
DIQMTQSPSSLSASVGDRVTITCRASQDVSTAVAWYQQKPGKAPKLLIYSASFLYSGVPSRFSGSGSGTDFTLTISSLQPEDFATYYCKQGFANPFTFGQGTKVEIKRTVAAPSVFIFPPSDEQLKSGTASVVCLLNNFYPREAKVQWKVDNALQSGNSQESVTEQDSKDSTYSLSSTLTLSKADYEKHKVYACEVTHQGLSSPVTKSFNRGEC

SEQ ID NO: 35 - protein, 227 aa, Artificial
  G6-23.1 Fab heavy chain
EVQLVESGGGLVQPGGSLRLSCAASGFTISDYWIHWVRQAPGKGLEWVAGVTPAGGYTYYADSVKGRFTISADTSKNTAYLQMNSLRAEDTAVYYCARFVFFLPYAMDYWGQGTLVTVSSASTKGPSVFPLAPSSKSTSGGTAALGCLVKDYFPEPVTVSWNSGALTSGVHTFPAVLQSSGLYSLSSVVTVPSSSLGTQTYICNVNHKPSNTKVDKKVEPKSCDKTH

SEQ ID NO: 36 - protein, 227 aa, Artificial
  G6-23.2 Fab heavy chain
EVQLVESGGGLVQPGGSLRLSCAASGFTISDYWIHWVRQAPGKGLEWVAGVTPAGGYTAYADSVKGRFTISADTSKNTAYLQMNSLRAEDTAVYYCARFVFFLPYAMDYWGQGTLVTVSSASTKGPSVFPLAPSSKSTSGGTAALGCLVKDYFPEPVTVSWNSGALTSGVHTFPAVLQSSGLYSLSSVVTVPSSSLGTQTYICNVNHKPSNTKVDKKVEPKSCDKTH

SEQ ID NO: 37 - protein, 214 aa, Artificial; identical to SEQ ID NO: 28
  B20 Fab light chain

SEQ ID NO: 38 - protein, 228 aa, Artificial
  B20 Fab heavy chain
EVQLVESGGGLVQPGGSLRLSCAASGFTINASWIHWVRQAPGKGLEWVGAIYPYSGYTNYADSVKGRFTISADTSKNTAYLQMNSLRAEDTAVYYCARWGHSTSPWAMDYWGQGTLVTVSSASTKGPSVFPLAPSSKSTSGGTAALGCLVKDYFPEPVTVSWNSGALTSGVHTFPAVLQSSGLYSLSSVVTVPSSSLGTQTYICNVNHKPSNTKVDKKVEPKSCDKTH

SEQ ID NO: 39 - protein, 214 aa, Artificial
  B20-4 Fab light chain
DIQMTQSPSSLSASVGDRVTITCRASQVIRRSLAWYQQKPGKAPKLLIYAASNLASGVPSRFSGSGSGTDFTLTISSLQPEDFATYYCQQSNTSPLTFGQGTKVEIKRTVAAPSVFIFPPSDEQLKSGTASVVCLLNNFYPREAKVQWKVDNALQSGNSQESVTEQDSKDSTYSLSSTLTLSKADYEKHKVYACEVTHQGLSSPVTKSFNRGEC

SEQ ID NO: 40 - protein, 214 aa, Artificial; identical to SEQ ID NO: 39
  B20-4.1 Fab light chain

SEQ ID NO: 41 - protein, 228 aa, Artificial
  B20-4.1 Fab heavy chain
EVQLVESGGGLVQPGGSLRLSCAASGFSINGSWIFWVRQAPGKGLEWVGAIWPFGGYTHYADSVKGRFTISADTSKNTAYLQMNSLRAEDTAVYYCARWGHSTSPWAMDYWGQGTLVTVSSASTKGPSVFPLAPSSKSTSGGTAALGCLVKDYFPEPVTVSWNSGALTSGVHTFPAVLQSSGLYSLSSVVTVPSSSLGTQTYICNVNHKPSNTKVDKKVEPKSCDKTH

SEQ ID NO: 42 - protein, 214 aa, Artificial
  YS1 Fab light chain
DIQMTQSPSSLSASVGDRVTITCRASQSYAYAVAWYQQKPGKAPKLLIYDASYLYSGVPSRFSGSGSGTDFTLTISSLQPEDFATYYCQQSSYSPYTFGQGTKVEIKRTVAAPSVFIFPPSDEQLKSGTASVVCLLNNFYPREAKVQWKVDNALQSGNSQESVTEQDSKDSTYSLSSTLTLSKADYEKHKVYACEVTHQGLSSPVTKSFNRGEC

SEQ ID NO: 43 - protein, 232 aa, Artificial; identical to SEQ ID NO: 20
  YS1 Fab heavy chain

SEQ ID NO: 44 - protein, 11 aa, Artificial
  G6-6a Light chain CDR1
RASQNVATFLA

SEQ ID NO: 45 - protein, 7 aa, Artificial
  G6-6a Light chain CDR2
SASNLAS

SEQ ID NO: 46 - protein, 9 aa, Artificial
  G6-6a Light chain CDR3
QQSYGSLPT

SEQ ID NO: 47 - protein, 214 aa, Artificial
  G6-6a Fab light chain
DIQMTQSPSSLSASVGDRVTITCRASQNVATFLAWYQQKPGKAPKLLIYSASNLASGVPSRFSGSGSGTDFTLTISSLQPEDFATYYCQQSYGSPLTFGQGTKVEIKRTVAAPSVFIFPPSDEQLKSGTASVVCLLNNFYPREAKVQWKVDNALQSGNSQESVTEQDSKDSTYSLSSTLTLSKADYEKHKVYACEVTHQGLSSPVTKSFNRGEC

SEQ ID NO: 48 - protein, 11 aa, Artificial
  G6-23 CDR1 light chain
RASQDVSTAVA

SEQ ID NO: 49 - protein, 7 aa, Artificial
  G6-23 CDR2 light chain
SASFLYS

SEQ ID NO: 50 - protein, 9 aa, Artificial
  G6-23 CDR3 light chain
QQGYANPWT

SEQ ID NO: 51 - protein, 214 aa, Artificial
  G6-23 Fab light chain
DIQMTQSPSSLSASVGDRVTITCRASQDVSTAVAWYQQKPGKAPKLLIYSASFLYSGVPSRFSGSGSGTDFTLTISSLQPEDFATYYCQQGYANPWTFGQGTKVEIKRTVAAPSVFIFPPSDEQLKSGTASVVCLLNNFYPREAKVQWKVDNALQSGNSQESVTEQDSKDSTYSLSSTLTLSKADYEKHKVYACEVTHQGLSSPVTKSFNRGEC

SEQ ID NO: 52 - protein, 9 aa, Artificial
  G6-31 CDR3 light chain
QQGYGNPFT

SEQ ID NO: 53 - protein, 214 aa, Artificial; identical to SEQ ID NO: 32
  G6-31 Fab light chain

SEQ ID NO: 54 - protein, 9 aa, Artificial
  G6-2a CDR3 light chain
QQGYGSPLT

SEQ ID NO: 55 - protein, 214 aa, Artificial
  G6-2a Fab light chain
DIQMTQSPSSLSASVGDRVTITCRASQDVSTAVAWYQQKPGKAPKLLIYSASFLYSGVPSRFSGSGSGTDFTLTISSLQPEDFATYYCQQGYGSPLTFGQGTKVEIKRTVAAPSVFIFPPSDEQLKSGTASVVCLLNNFYPREAKVQWKVDNALQSGNSQESVTEQDSKDSTYSLSSTLTLSKADYEKHKVYACEVTHQGLSSPVTKSFNRGEC

SEQ ID NO: 56 - protein, 11 aa, Artificial
  G6-2b CDR1 light chain
RASQGGTTSLA

SEQ ID NO: 57 - protein, 7 aa, Artificial
  G6-2b CDR2 light chain
SASNLAS

SEQ ID NO: 58 - protein, 9 aa, Artificial
  G6-2b CDR3 light chain
QQGYGSPFT

SEQ ID NO: 59 - protein, 214 aa, Artificial
  G6-2b Fab light chain
DIQMTQSPSSLSASVGDRVTITCRASQGGTTSLAWYQQKPGKAPKLLIYSASNLASGVPSRFSGSGSGTDFTLTISSLQPEDFATYYCQQGYGSPFTFGQGTKVEIKRTVAAPSVFIFPPSDEQLKSGTASVVCLLNNFYPREAKVQWKVDNALQSGNSQESVTEQDSKDSTYSLSSTLTLSKADYEKHKVYACEVTHQGLSSPVTKSFNRGEC

SEQ ID NO: 60 - protein, 11 aa, Artificial
  G6-6b CDR1 light chain
RASQIVTNSLA

SEQ ID NO: 61 - protein, 7 aa, Artificial
  G6-6b CDR2 light chain
LASSLAS

SEQ ID NO: 62 - protein, 9 aa, Artificial
  G6-2b CDR3 light chain
QQGATDPRT

SEQ ID NO: 63 - protein, 214 aa, Artificial
  G6-6b Fab light chain
DIQMTQSPSSLSASVGDRVTITCRASQIVTNSLAWYQQKPGKAPKLLIYLASSLASEVPSRFSGSGSGTDFTLTISSLQPEDFATYYCQQGATDPRTFGQGTKVEIKRTVAAPSVFIFPPSDEQLKSGTASVVCLLNNFYPREAKVQWKVDNALQSGNSQESVTEQDSKDSTYSLSSTLTLSKADYEKHKVYACEVTHQGLSSPVTKSFNRGEC

SEQ ID NO: 64 - protein, 9 aa, Artificial
  G6-48 CDR3 light chain
QQGTSSPPT

SEQ ID NO: 65 - protein, 214 aa, Artificial
  G6-48 Fab light chain
DIQMTQSPSSLSASVGDRVTITCRASQDVSTAVAWYQQKPGKAPKLLIYSASFLYSGVPSRFSGSGSGTDFTLTISSLQPEDFATYYCQQGTSSPPTFGQGTKVEIKRTVAAPSVFIFPPSDEQLKSGTASVVCLLNNFYPREAKVQWKVDNALQSGNSQESVTEQDSKDSTYSLSSTLTLSKADYEKHKVYACEVTHQGLSSPVTKSFNRGEC

SEQ ID NO: 66 - protein, 8 aa, Artificial
  G6-1a CDR3 light chain
QQGTGNPT

SEQ ID NO: 67 - protein, 214 aa, Artificial
  G6-1a Fab light chain
DIQMTQSPSSLSASVGDRVTITCRASQDVSTAVAWYQQKPGKAPKLLIYSASFLYSGVPSRFSGSGSGTDFTLTISSLQPEDFATYYCQQGTGNPPTFGQGTKVEIKRTVAAPSVFIFPPSDEQLKSGTASVVCLLNNFYPREAKVQWKVDNALQSGNSQESVTEQDSKDSTYSLSSTLTLSKADYEKHKVYACEVTHQGLSSPVTKSFNRGEC

SEQ ID NO: 68 - protein, 9 aa, Artificial
  G6-8 CDR3 light chain
QQGAGSPLT

SEQ ID NO: 69 - protein, 214 aa, Artificial; identical to SEQ ID NO: 33
  G6-8 Fab light chain

SEQ ID NO: 70 - protein, 7 aa, Artificial
  G6-3 CDR2 light chain
AASFLYS

SEQ ID NO: 71 - protein, 9 aa, Artificial
  G6-3 CDR3 light chain
QQGSGHPFT

SEQ ID NO: 72 - protein, 214 aa, Artificial
  G6-3 Fab light chain
DIQMTQSPSSLSASVGDRVTITCRASQDVSTAVAWYQQKPGKAPKLLIYAASFLYSGVPSRFSGSGSGTDFTLTISSLQPEDFATYYCQQGSGHPFTFGQGTKVEIKRTVAAPSVFIFPPSDEQLKSGTASVVCLLNNFYPREAKVQWKVDNALQSGNSQESVTEQDSKDSTYSLSSTLTLSKADYEKHKVYACEVTHQGLSSPVTKSFNRGEC

SEQ ID NO: 73 - protein, 9 aa, Artificial
  G6-34 CDR3 light chain
QQGTGSPLT

SEQ ID NO: 74 - protein, 214 aa, Artificial
  G-6-34 Fab light chain
DIQMTQSPSSLSASVGDRVTITCRASQDVSTAVAWYQQKPGKAPKLLIYSASFLYSGVPSRFSGSGSGTDFTLTISSLQPEDFATYYCQQGTGSPLTFGQGTKVEIKRTVAAPSVFIFPPSDEQLKSGTASVVCLLNNFYPREAKVQWKVDNALQSGNSQESVTEQDSKDSTYSLSSTLTLSKADYEKHKVYACEVTHQGLSSPVTKSFNRGEC

SEQ ID NO: 75 - protein, 9 aa, Artificial
  G6-4a CDR3 light chain
QQGSGNPFT

SEQ ID NO: 76 - protein, 214 aa, Artificial
  G6-4a Fab light chain
DIQMTQSPSSLSASVGDRVTITCRASQDVSTAVAWYQQKPGKAPKLLIYSASFLYSGVPSRFSGSGSGTDFTLTISSLQPEDFATYYCQQGSGNPFTFGQGTKVEIKRTVAAPSVFIFPPSDEQLKSGTASVVCLLNNFYPREAKVQWKVDNALQSGNSQESVTEQDSKDSTYSLSSTLTLSKADYEKHKVYACEVTHQGLSSPVTKSFNRGEC

SEQ ID NO: 77 - protein, 9 aa, Artificial
  G6-1a CDR3 light chain
QQGTGNPLT

SEQ ID NO: 78 - protein, 214 aa, Artificial
  G6-1a Fab light chain
DIQMTQSPSSLSASVGDRVTITCRASQDVSTAVAWYQQKPGKAPKLLIYSASFLYSGVPSRFSGSGSGTDFTLTISSLQPEDFATYYCQQGTGNPLTFGQGTKVEIKRTVAAPSVFIFPPSDEQLKSGTASVVCLLNNFYPREAKVQWKVDNALQSGNSQESVTEQDSKDSTYSLSSTLTLSKADYEKHKVYACEVTHQGLSSPVTKSFNRGEC

SEQ ID NO: 79 - protein, 9 aa, Artificial
  G6-4b CDR3 light chain
QQGSGSPFT

SEQ ID NO: 80 - protein, 214 aa, Artificial
  G6-4b Fab light chain
DIQMTQSPSSLSASVGDRVTITCRASQDVSTAVAWYQQKPGKAPKLLIYSASFLYSGVPSRFSGSGSGTDFTLTISSLQPEDFATYYCQQGSGSPFTFGQGTKVEIKRTVAAPSVFIFPPSDEQLKSGTASVVCLLNNFYPREAKVQWKVDNALQSGNSQESVTEQDSKDSTYSLSSTLTLSKADYEKHKVYACEVTHQGLSSPVTKSFNRGEC

SEQ ID NO: 81 - protein, 9 aa, Artificial
  G6-5 CDR3 light chain
QQGAGSPFT

SEQ ID NO: 82 - protein, 214 aa, Artificial
  G6-5 Fab light chain
DIQMTQSPSSLSASVGDRVTITCRASQDVSTAVAWYQQKPGKAPKLLIYSASFLYSGVPSRFSGSGSGTDFTLTISSLQPEDFATYYCQQGAGSPFTFGQGTKVEIKRTVAAPSVFIFPPSDEQLKSGTASVVCLLNNFYPREAKVQWKVDNALQSGNSQESVTEQDSKDSTYSLSSTLTLSKADYEKHKVYACEVTHQGLSSPVTKSFNRGEC

SEQ ID NO: 83 - protein, 9 aa, Artificial
  G6-15 CDR3 light chain
QQGVNSPLT

SEQ ID NO: 84 - protein, 214 aa, Artificial
  G6-15 Fab light chain
DIQMTQSPSSLSASVGDRVTITCRASQDVSTAVAWYQQKPGKAPKLLIYSASFLYSGVPSRFSGSGSGTDFTLTISSLQPEDFATYYCQQGVNSPLTFGQGTKVEIKRTVAAPSVFIFPPSDEQLKSGTASVVCLLNNFYPREAKVQWKVDNALQSGNSQESVTEQDSKDSTYSLSSTLTLSKADYEKHKVYACEVTHQGLSSPVTKSFNRGEC

SEQ ID NO: 85 - protein, 11 aa, Artificial
  B20 CDR-L1
RASQDVSTAVA

SEQ ID NO: 86 - protein, 7 aa, Artificial
  B20 CDR-L2
SASFLYS

SEQ ID NO: 87 - protein, 9 aa, Artificial
  B20 CDR-L3
QQSYTTPPT

SEQ ID NO: 88 - protein, 214 aa, Artificial; identical to SEQ ID NO: 28
  B20 LC

SEQ ID NO: 89 - protein, 11 aa, Artificial
  B20-50 CDR-L1
RASQDVSTAVA

SEQ ID NO: 90 - protein, 7 aa, Artificial
  B20-50 CDR-L2
SASFLYS

SEQ ID NO: 91 - protein, 9 aa, Artificial
  B20-50 CDR-L3
QQSYGAPLT

SEQ ID NO: 92 - protein, 214 aa, Artificial
  B20-50 LC
DIQMTQSPSSLSASVGDRVTITCRASQDVSTAVAWYQQKPGKAPKLLIYSASFLYSGVPSRFSGSGSGTDFTLTISSLQPEDFATYYCQQSYGAPLTFGQGTKVEIKRTVAAPSVFIFPPSDEQLKSGTASVVCLLNNFYPREAKVQWKVDNALQSGNSQESVTEQDSKDSTYSLSSTLTLSKADYEKHKVYACEVTHQGLSSPVTKSFNRGEC

SEQ ID NO: 93 - protein, 11 aa, Artificial
  B20-59 CDR-L1
RASQDVSTAVA

SEQ ID NO: 94 - protein, 7 aa, Artificial
  B20-59 CDR-L2
SASFLYS

SEQ ID NO: 95 - protein, 9 aa, Artificial
  B20-59 CDR-L3
QQSYSSPLT

SEQ ID NO: 96 - protein, 214 aa, Artificial
  B20-59 LC
DIQMTQSPSSLSASVGDRVTITCRASQDVSTAVAWYQQKPGKAPKLLIYSASFLYSGVPSRFSGSGSGTDFTLTISSLQPEDFATYYCQQSYSSPLTFGQGTKVEIKRTVAAPSVFIFPPSDEQLKSGTASVVCLLNNFYPREAKVQWKVDNALQSGNSQESVTEQDSKDSTYSLSSTLTLSKADYEKHKVYACEVTHQGLSSPVTKSFNRGEC

SEQ ID NO: 97 - protein, 11 aa, Artificial
  B20-73 CDR-L1
RASQGVRTSLA

SEQ ID NO: 98 - protein, 7 aa, Artificial
  B20-73 CDR-L2
GASTLAS

SEQ ID NO: 99 - protein, 9 aa, Artificial
  B20-73 CDR-L3
QQSYASPLT

SEQ ID NO: 100 - protein, 214 aa, Artificial
  B20-73 LC
DIQMTQSPSSLSASVGDRVTITCRASQGVRTSLAWYQQKPGKAPKLLIYGASTLASGVPSRFSGSGSGTDFTLTISSLQPEDFATYYCQQSYASPLTFGQGTKVEIKRTVAAPSVFIFPPSDEQLKSGTASVVCLLNNFYPREAKVQWKVDNALQSGNSQESVTEQDSKDSTYSLSSTLTLSKADYEKHKVYACEVTHQGLSSPVTKSFNRGEC

SEQ ID NO: 101 - protein, 11 aa, Artificial
  B20-3 CDR-L1
RASQVIGRSLA

SEQ ID NO: 102 - protein, 7 aa, Artificial
  B20-3 CDR-L2
SASFLYS

SEQ ID NO: 103 - protein, 9 aa, Artificial
  B20-3 CDR-L3
QQSYASPLT

SEQ ID NO: 104 - protein, 214 aa, Artificial
  B20-3 LC
DIQMTQSPSSLSASVGDRVTITCRASQVIGRSLAWYQQKPGKAPKLLIYSASFLYSGVPSRFSGSGSGTDFTLTISSLQPEDFATYYCQQSYASPLTFGQGTKVEIKRTVAAPSVFIFPPSDEQLKSGTASVVCLLNNFYPREAKVQWKVDNALQSGNSQESVTEQDSKDSTYSLSSTLTLSKADYEKHKVYACEVTHQGLSSPVTKSFNRGEC

SEQ ID NO: 105 - protein, 11 aa, Artificial
  B20-8 CDR-L1
RASQDVSTAVA

SEQ ID NO: 106 - protein, 7 aa, Artificial
  B20-8 CDR-L2
SASFLYS

SEQ ID NO: 107 - protein, 9 aa, Artificial
  B20-8 CDR-L3
QQSYGSPLT

SEQ ID NO: 108 - protein, 214 aa, Artificial
  B20-8 LC
DIQMTQSPSSLSASVGDRVTITCRASQDVSTAVAWYQQKPGKAPKLLIYSASFLYSGVPSRFSGSGSGTDFTLTISSLQPEDFATYYCQQSYGSPLTFGQGTKVEIKRTVAAPSVFIFPPSDEQLKSGTASVVCLLNNFYPREAKVQWKVDNALQSGNSQESVTEQDSKDSTYSLSSTLTLSKADYEKHKVYACEVTHQGLSSPVTKSFNRGEC

SEQ ID NO: 109 - protein, 11 aa, Artificial
  B20-2 CDR-L1
RASQNVRSSLA

SEQ ID NO: 110 - protein, 7 aa, Artificial
  B20-2 CDR-L2
SASNLES

SEQ ID NO: 111 - protein, 9 aa, Artificial
  B20-2 CDR-L3
QQSYAAPLT

SEQ ID NO: 112 - protein, 214 aa, Artificial
  B20-2 LC
DIQMTQSPSSLSASVGDRVTITCRASQNVRSSLAWYQQKPGKAPKLLIYSASNLESGVPSRFSGSGSGTDFTLTISSLQPEDFATYYCQQSYAAPLTFGQGTKVEIKRTVAAPSVFIFPPSDEQLKSGTASVVCLLNNFYPREAKVQWKVDNALQSGNSQESVTEQDSKDSTYSLSSTLTLSKADYEKHKVYACEVTHQGLSSPVTKSFNRGEC

SEQ ID NO: 113 - protein, 11 aa, Artificial
  B20-4a CDR-L1
RASQVIGTSLA

SEQ ID NO: 114 - protein, 7 aa, Artificial
  B20-4a CDR-L2
SASNLAS

SEQ ID NO: 115 - protein, 9 aa, Artificial
  B20-4a CDR-L3
QQSYGSPLT

SEQ ID NO: 116 - protein, 214 aa, Artificial
  B20-4a LC
DIQMTQSPSSLSASVGDRVTITCRASQVIGTSLAWYQQKPGKAPKLLIYSASNLASGVPSRFSGSGSGTDFTLTISSLQPEDFATYYCQQSYGSPLTFGQGTKVEIKRTVAAPSVFIFPPSDEQLKSGTASVVCLLNNFYPREAKVQWKVDNALQSGNSQESVTEQDSKDSTYSLSSTLTLSKADYEKHKVYACEVTHQGLSSPVTKSFNRGEC

SEQ ID NO: 117 - protein, 11 aa, Artificial
  B20-4 CDR-L1
RASQVIRRSLA

SEQ ID NO: 118 - protein, 7 aa, Artificial
  B20-4 CDR-L2
AASNLAS

SEQ ID NO: 119 - protein, 9 aa, Artificial
  B20-4 CDR-L3
QQSNTSPLT

SEQ ID NO: 120 - protein, 214 aa, Artificial; identical to SEQ ID NO: 39
  B20-4 LC

SEQ ID NO: 121 - protein, 11 aa, Artificial
  B20-6 CDR-L1
RASQDVSTAVA

SEQ ID NO: 122 - protein, 7 aa, Artificial
  B20-6 CDR-L2
SASTLAS

SEQ ID NO: 123 - protein, 9 aa, Artificial
  B20-6 CDR-L3
QQSTTSPLT

SEQ ID NO: 124 - protein, 214 aa, Artificial
  B20-6 LC
DIQMTQSPSSLSASVGDRVTITCRASQDVSTAVAWYQQKPGKAPKLLIYSASTLASGVPSRFSGSGSGTDFTLTISSLQPEDFATYYCQQSTTSPLTFGQGTKVEIKRTVAAPSVFIFPPSDEQLKSGTASVVCLLNNFYPREAKVQWKVDNALQSGNSQESVTEQDSKDSTYSLSSTLTLSKADYEKHKVYACEVTHQGLSSPVTKSFNRGEC

SEQ ID NO: 125 - protein, 11 aa, Artificial
  B20-5 CDR-L1
RASQDVSTAVA

SEQ ID NO: 126 - protein, 7 aa, Artificial
  B20-5 CDR-L2
SASFLYS

SEQ ID NO: 127 - protein, 9 aa, Artificial
  B20-5 CDR-L3
QQSTNSPLT

SEQ ID NO: 128 - protein, 214 aa, Artificial
  B20-5 LC
DIQMTQSPSSLSASVGDRVTITCRASQDVSTAVAWYQQKPGKAPKLLIYSASFLYSGVPSRFSGSGSGTDFTLTISSLQPEDFATYYCQQSTNSPLTFGQGTKVEIKRTVAAPSVFIFPPSDEQLKSGTASVVCLLNNFYPREAKVQWKVDNALQSGNSQESVTEQDSKDSTYSLSSTLTLSKADYEKHKVYACEVTHQGLSSPVTKSFNRGEC

SEQ ID NO: 129 - protein, 11 aa, Artificial
  B20-1a CDR-L1
RASQGVKNSLA

SEQ ID NO: 130 - protein, 7 aa, Artificial
  B20-1a CDR-L2
SASTLES

SEQ ID NO: 131 - protein, 9 aa, Artificial
  B20-1a CDR-L3
QQSNASPLT

SEQ ID NO: 132 - protein, 214 aa, Artificial
  B20-1a LC
DIQMTQSPSSLSASVGDRVTITCRASQGVKNSLAWYQQKPGKAPKLLIYSASTLESGVPSRFSGSGSGTDFTLTISSLQPEDFATYYCQQSNASPLTFGQGTKVEIKRTVAAPSVFIFPPSDEQLKSGTASVVCLLNNFYPREAKVQWKVDNALQSGNSQESVTEQDSKDSTYSLSSTLTLSKADYEKHKVYACEVTHQGLSSPVTKSFNRGEC

SEQ ID NO: 133 - protein, 11 aa, Artificial
  B20-1 CDR-L1
RASQDVRTSLA

SEQ ID NO: 134 - protein, 7 aa, Artificial
  B20-1 CDR-L2
GASTLAS

SEQ ID NO: 135 - protein, 9 aa, Artificial
  B20-1 CDR-L3
QQSNSSPLT

SEQ ID NO: 136 - protein, 214 aa, Artificial
  B20-1 LC
DIQMTQSPSSLSASVGDRVTITCRASQDVRTSLAWYQQKPGKAPKLLIYGASTLASGVPSRFSGSGSGTDFTLTISSLQPEDFATYYCQQSNSSPLTFGQGTKVEIKRTVAAPSVFIFPPSDEQLKSGTASVVCLLNNFYPREAKVQWKVDNALQSGNSQESVTEQDSKDSTYSLSSTLTLSKADYEKHKVYACEVTHQGLSSPVTKSFNRGEC

SEQ ID NO: 137 - protein, 11 aa, Artificial
  B20-13 CDR-L1
RASQNVRNFLA

SEQ ID NO: 138 - protein, 7 aa, Artificial
  B20-13 CDR-L2
SASTLAS

SEQ ID NO: 139 - protein, 9 aa, Artificial
  B20-13 CDR-L3
QQHTNSPLT

SEQ ID NO: 140 - protein, 214 aa, Artificial
  B20-13 LC
DIQMTQSPSSLSASVGDRVTITCRASQNVRNFLAWYQQKPGKAPKLLIYSASTLASGVPSRFSGSGSGTDFTLTISSLQPEDFATYYCQQHTNSPLTFGQGTKVEIKRTVAAPSVFIFPPSDEQLKSGTASVVCLLNNFYPREAKVQWKVDNALQSGNSQESVTEQDSKDSTYSLSSTLTLSKADYEKHKVYACEVTHQGLSSPVTKSFNRGEC

SEQ ID NO: 141 - protein, 11 aa, Artificial
  G623 CDR-L1
RASQDVSTAVA

SEQ ID NO: 142 - protein, 7 aa, Artificial
  G623 CDR-L2
SASFLYS

SEQ ID NO: 143 - protein, 9 aa, Artificial
  G623 CDR-L3
KQGYANPWT

SEQ ID NO: 144 - protein, 214 aa, Artificial; identical to SEQ ID NO: 30
  G623 LC

SEQ ID NO: 145 - protein, 11 aa, Artificial
  G623_57 CDR-L1
RASEAVSAAVA

SEQ ID NO: 146 - protein, 7 aa, Artificial
  G623_57 CDR-L2
SASFLSS

SEQ ID NO: 147 - protein, 9 aa, Artificial
  G623_57 CDR-L3
AQGYAAPST

SEQ ID NO: 148 - protein, 214 aa, Artificial
  G623_57 LC
DIQMTQSPSSLSASVGDRVTITCRASEAVSAAVAWYQQKPGKAPKLLIYSASFLSSGVPSRFSGSGSGTDFTLTISSLQPEDFATYYCAQGYAAPSTFGQGTKVEIKRTVAAPSVFIFPPSDEQLKSGTASVVCLLNNFYPREAKVQWKVDNALQSGNSQESVTEQDSKDSTYSLSSTLTLSKADYEKHKVYACEVTHQGLSSPVTKSFNRGEC

SEQ ID NO: 149 - protein, 11 aa, Artificial
  G623_13 CDR-L1
RASAAVAAAVA

SEQ ID NO: 150 - protein, 7 aa, Artificial
  G623_13 CDR-L2
SASFLAS

SEQ ID NO: 151 - protein, 9 aa, Artificial
  G623_13 CDR-L3
AQGYGAPST

SEQ ID NO: 152 - protein, 214 aa, Artificial
  G623_13 LC
DIQMTQSPSSLSASVGDRVTITCRASAAVAAAVAWYQQKPGKAPKLLIYSASFLASGVPSRFSGSGSGTDFTLTISSLQPEDFATYYCAQGYGAPSTFGQGTKVEIKRTVAAPSVFIFPPSDEQLKSGTASVVCLLNNFYPREAKVQWKVDNALQSGNSQESVTEQDSKDSTYSLSSTLTLSKADYEKHKVYACEVTHQGLSSPVTKSFNRGEC

SEQ ID NO: 153 - protein, 11 aa, Artificial
  G623_87 CDR-L1
RASQEVATAVA

SEQ ID NO: 154 - protein, 7 aa, Artificial
  G623_87 CDR-L2
SASYLYS

SEQ ID NO: 155 - protein, 9 aa, Artificial
  G623_87 CDR-L3
KQGFSDPWT

SEQ ID NO: 156 - protein, 214 aa, Artificial
  G623_87 LC
DIQMTQSPSSLSASVGDRVTITCRASQEVATAVAWYQQKPGKAPKLLIYSASYLYSGVPSRFSGSGSGTDFTLTISSLQPEDFATYYCKQGFSDPWTFGQGTKVEIKRTVAAPSVFIFPPSDEQLKSGTASVVCLLNNFYPREAKVQWKVDNALQSGNSQESVTEQDSKDSTYSLSSTLTLSKADYEKHKVYACEVTHQGLSSPVTKSFNRGEC

SEQ ID NO: 157 - protein, 11 aa, Artificial
  G623_77 CDR-L1
RASEEVATAVA

SEQ ID NO: 158 - protein, 7 aa, Artificial
  G623_77 CDR-L2
AASFLYS

SEQ ID NO: 159 - protein, 9 aa, Artificial
  G623_77 CDR-L3
KQGYANPWT

SEQ ID NO: 160 - protein, 214 aa, Artificial
  G623_77 LC
DIQMTQSPSSLSASVGDRVTITCRASEEVATAVAWYQQKPGKAPKLLIYAASFLYSGVPSRFSGSGSGTDFTLTISSLQPEDFATYYCKQGYANPWTFGQGTKVEIKRTVAAPSVFIFPPSDEQLKSGTASVVCLLNNFYPREAKVQWKVDNALQSGNSQESVTEQDSKDSTYSLSSTLTLSKADYEKHKVYACEVTHQGLSSPVTKSFNRGEC

SEQ ID NO: 161 - protein, 11 aa, Artificial
  G623_20 CDR-L1
RASADVAAAVA

SEQ ID NO: 162 - protein, 7 aa, Artificial
  G623_20 CDR-L2
SASFLAS

SEQ ID NO: 163 - protein, 9 aa, Artificial
  G623_20 CDR-L3
AQGSGAPAT

SEQ ID NO: 164 - protein, 214 aa, Artificial
  G623_20 LC
DIQMTQSPSSLSASVGDRVTITCRASADVAAAVAWYQQKPGKAPKLLIYSASFLASGVPSRFSGSGSGTDFTLTISSLQPEDFATYYCAQGSGAPATFGQGTKVEIKRTVAAPSVFIFPPSDEQLKSGTASVVCLLNNFYPREAKVQWKVDNALQSGNSQESVTEQDSKDSTYSLSSTLTLSKADYEKHKVYACEVTHQGLSSPVTKSFNRGEC

SEQ ID NO: 165 - protein, 11 aa, Artificial
  G623_51 CDR-L1
RASADASTAVA

SEQ ID NO: 166 - protein, 7 aa, Artificial
  G623_51 CDR-L2
AASFLYS

SEQ ID NO: 167 - protein, 9 aa, Artificial
  G623_51 CDR-L3
AQGYANPAT

SEQ ID NO: 168 - protein, 214 aa, Artificial
  G623_51 LC
DIQMTQSPSSLSASVGDRVTITCRASADASTAVAWYQQKPGKAPKLLIYAASFLYSGVPSRFSGSGSGTDFTLTISSLQPEDFATYYCAQGYANPATFGQGTKVEIKRTVAAPSVFIFPPSDEQLKSGTASVVCLLNNFYPREAKVQWKVDNALQSGNSQESVTEQDSKDSTYSLSSTLTLSKADYEKHKVYACEVTHQGLSSPVTKSFNRGEC

SEQ ID NO: 169 - protein, 11 aa, Artificial
  G623_36 CDR-L1
RASEEISTAVA

SEQ ID NO: 170 - protein, 7 aa, Artificial
  G623_36 CDR-L2
SASYLYS

SEQ ID NO: 171 - protein, 9 aa, Artificial
  G623_36 CDR-L3
KQGPSDPWT

SEQ ID NO: 172 - protein, 214 aa, Artificial
  G623_36 LC
DIQMTQSPSSLSASVGDRVTITCRASEEISTAVAWYQQKPGKAPKLLIYSASYLYSGVPSRFSGSGSGTDFTLTISSLQPEDFATYYCKQGPSDPWTFGQGTKVEIKRTVAAPSVFIFPPSDEQLKSGTASVVCLLNNFYPREAKVQWKVDNALQSGNSQESVTEQDSKDSTYSLSSTLTLSKADYEKHKVYACEVTHQGLSSPVTKSFNRGEC

SEQ ID NO: 173 - protein, 11 aa, Artificial
  G623_80 CDR-L1
RASQEVASAVA

SEQ ID NO: 174 - protein, 7 aa, Artificial
  G623_80 CDR-L2
SASYLFS

SEQ ID NO: 175 - protein, 9 aa, Artificial
  G623_80 CDR-L3
KQAFSNPLT

SEQ ID NO: 176 - protein, 214 aa, Artificial
  G623_80 LC
DIQMTQSPSSLSASVGDRVTITCRASQEVASAVAWYQQKPGKAPKLLIYSASYLFSGVPSRFSGSGSGTDFTLTISSLQPEDFATYYCKQAFSNPLTFGQGTKVEIKRTVAAPSVFIFPPSDEQLKSGTASVVCLLNNFYPREAKVQWKVDNALQSGNSQESVTEQDSKDSTYSLSSTLTLSKADYEKHKVYACEVTHQGLSSPVTKSFNRGEC

SEQ ID NO: 177 - protein, 11 aa, Artificial
  G623_66 CDR-L1
RASPDVATGVA

SEQ ID NO: 178 - protein, 7 aa, Artificial
  G623_66 CDR-L2
SASFLSS

SEQ ID NO: 179 - protein, 9 aa, Artificial
  G623_66 CDR-L3
AQAYAAPAT

SEQ ID NO: 180 - protein, 214 aa, Artificial
  G623_66 LC
DIQMTQSPSSLSASVGDRVTITCRASPDVATGVAWYQQKPGKAPKLLIYSASFLSSGVPSRFSGSGSGTDFTLTISSLQPEDFATYYCAQAYAAPATFGQGTKVEIKRTVAAPSVFIFPPSDEQLKSGTASVVCLLNNFYPREAKVQWKVDNALQSGNSQESVTEQDSKDSTYSLSSTLTLSKADYEKHKVYACEVTHQGLSSPVTKSFNRGEC

SEQ ID NO: 181 - protein, 11 aa, Artificial
  G623_33 CDR-L1
RASPAVSAAVA

SEQ ID NO: 182 - protein, 7 aa, Artificial
  G623_33 CDR-L2
SASFLYS

SEQ ID NO: 183 - protein, 9 aa, Artificial
  G623_33 CDR-L3
AQGSAAPAT

SEQ ID NO: 184 - protein, 214 aa, Artificial
  G623_33 LC
DIQMTQSPSSLSASVGDRVTITCRASPAVSAAVAWYQQKPGKAPKLLIYSASFLYSGVPSRFSGSGSGTDFTLTISSLQPEDFATYYCAQGSAAPATFGQGTKVEIKRTVAAPSVFIFPPSDEQLKSGTASVVCLLNNFYPREAKVQWKVDNALQSGNSQESVTEQDSKDSTYSLSSTLTLSKADYEKHKVYACEVTHQGLSSPVTKSFNRGEC

SEQ ID NO: 185 - protein, 11 aa, Artificial
  G623_59 CDR-L1
RASPAVAAGVA

SEQ ID NO: 186 - protein, 7 aa, Artificial
  G623_59 CDR-L2
SASFLYS

SEQ ID NO: 187 - protein, 9 aa, Artificial
  G623_59 CDR-L3
AQAYAAPAT

SEQ ID NO: 188 - protein, 214 aa, Artificial
  G623_59 LC
DIQMTQSPSSLSASVGDRVTITCRASPAVAAGVAWYQQKPGKAPKLLIYSASFLYSGVPSRFSGSGSGTDFTLTISSLQPEDFATYYCAQAYAAPATFGQGTKVEIKRTVAAPSVFIFPPSDEQLKSGTASVVCLLNNFYPREAKVQWKVDNALQSGNSQESVTEQDSKDSTYSLSSTLTLSKADYEKHKVYACEVTHQGLSSPVTKSFNRGEC

SEQ ID NO: 189 - protein, 11 aa, Artificial
  G623_22 CDR-L1
RASPAVAAAVA

SEQ ID NO: 190 - protein, 7 aa, Artificial
  G623_22 CDR-L2
SASVLYS

SEQ ID NO: 191 - protein, 9 aa, Artificial
  G623_22 CDR-L3
AQAYAAPAT

SEQ ID NO: 192 - protein, 214 aa, Artificial
  G623_22 LC
DIQMTQSPSSLSASVGDRVTITCRASPAVAAAVAWYQQKPGKAPKLLIYSASVLYSGVPSRFSGSGSGTDFTLTISSLQPEDFATYYCAQAYAAPATFGQGTKVEIKRTVAAPSVFIFPPSDEQLKSGTASVVCLLNNFYPREAKVQWKVDNALQSGNSQESVTEQDSKDSTYSLSSTLTLSKADYEKHKVYACEVTHQGLSSPVTKSFNRGEC

SEQ ID NO: 193 - protein, 11 aa, Artificial
  G623_29 CDR-L1
RASQEVSTAVA

SEQ ID NO: 194 - protein, 7 aa, Artificial
  G623_29 CDR-L2
SASYLFS

SEQ ID NO: 195 - protein, 9 aa, Artificial
  G623_29 CDR-L3
KQGFSNPWT

SEQ ID NO: 196 - protein, 214 aa, Artificial
  G623_29 LC
DIQMTQSPSSLSASVGDRVTITCRASQEVSTAVAWYQQKPGKAPKLLIYSASYLFSGVPSRFSGSGSGTDFTLTISSLQPEDFATYYCKQGFSNPWTFGQGTKVEIKRTVAAPSVFIFPPSDEQLKSGTASVVCLLNNFYPREAKVQWKVDNALQSGNSQESVTEQDSKDSTYSLSSTLTLSKADYEKHKVYACEVTHQGLSSPVTKSFNRGEC

SEQ ID NO: 197 - protein, 11 aa, Artificial
  G623_49 CDR-L1
RASPDVATGVA

SEQ ID NO: 198 - protein, 7 aa, Artificial
  G623_49 CDR-L2
SASFLSS

SEQ ID NO: 199 - protein, 9 aa, Artificial
  G623_49 CDR-L3
AQAYAAPAT

SEQ ID NO: 200 - protein, 214 aa, Artificial; identical to SEQ ID NO: 180
  G623_49 LC

SEQ ID NO: 201 - protein, 12 aa, Artificial
  G623_58 CDR-L1
RASPAVASAAVA

SEQ ID NO: 202 - protein, 7 aa, Artificial
  G623_58 CDR-L2
AASFLAS

SEQ ID NO: 203 - protein, 9 aa, Artificial
  G623_58 CDR-L3
AQGSGAPAT

SEQ ID NO: 204 - protein, 214 aa, Artificial
  G623_58 LC
DIQMTQSPSSLSASVGDRVTITCRASQDVATAVAWYQQKPGKAPKLLIYAASFLASGVPSRFSGSGSGTDFTLTISSLQPEDFATYYCAQGSGAPATFGQGTKVEIKRTVAAPSVFIFPPSDEQLKSGTASVVCLLNNFYPREAKVQWKVDNALQSGNSQESVTEQDSKDSTYSLSSTLTLSKADYEKHKVYACEVTHQGLSSPVTKSFNRGEC

SEQ ID NO: 205 - protein, 11 aa, Artificial
  G623_37 CDR-L1
RASQDVATAVA

SEQ ID NO: 206 - protein, 7 aa, Artificial
  G623_37 CDR-L2
AASYLYS

SEQ ID NO: 207 - protein, 9 aa, Artificial
  G623_37 CDR-L3
EQAFSNPLT

SEQ ID NO: 208 - protein, 214 aa, Artificial
  G623_37 LC
DIQMTQSPSSLSASVGDRVTITCRASQDVATAVAWYQQKPGKAPKLLIYAASYLYSGVPSRFSGSGSGTDFTLTISSLQPEDFATYYCEQAFSNPLTFGQGTKVEIKRTVAAPSVFIFPPSDEQLKSGTASVVCLLNNFYPREAKVQWKVDNALQSGNSQESVTEQDSKDSTYSLSSTLTLSKADYEKHKVYACEVTHQGLSSPVTKSFNRGEC

SEQ ID NO: 209 - protein, 11 aa, Artificial
  G623_23 CDR-L1
RASQAASAAVA

SEQ ID NO: 210 - protein, 7 aa, Artificial
  G623_23 CDR-L2
AASFLSS

SEQ ID NO: 211 - protein, 9 aa, Artificial
  G623_23 CDR-L3
AQGAAAPST

SEQ ID NO: 212 - protein, 214 aa, Artificial
  G623_23 LC
DIQMTQSPSSLSASVGDRVTITCRASQAASAAVAWYQQKPGKAPKLLIYAASFLSSGVPSRFSGSGSGTDFTLTISSLQPEDFATYYCAQGAAAPSTFGQGTKVEIKRTVAAPSVFIFPPSDEQLKSGTASVVCLLNNFYPREAKVQWKVDNALQSGNSQESVTEQDSKDSTYSLSSTLTLSKADYEKHKVYACEVTHQGLSSPVTKSFNRGEC

SEQ ID NO: 213 - protein, 11 aa, Artificial
  G623_89 CDR-L1
RASQDVATAVA

SEQ ID NO: 214 - protein, 7 aa, Artificial
  G623_89 CDR-L2
SASYLYS

SEQ ID NO: 215 - protein, 9 aa, Artificial
  G623_89 CDR-L3
QEGFSDPLT

SEQ ID NO: 216 - protein, 214 aa, Artificial
  G623_89 LC
DIQMTQSPSSLSASVGDRVTITCRASQDVATAVAWYQQKPGKAPKLLIYSASYLYSGVPSRFSGSGSGTDFTLTISSLQPEDFATYYCQEGFSDPLTFGQGTKVEIKRTVAAPSVFIFPPSDEQLKSGTASVVCLLNNFYPREAKVQWKVDNALQSGNSQESVTEQDSKDSTYSLSSTLTLSKADYEKHKVYACEVTHQGLSSPVTKSFNRGEC

SEQ ID NO: 217 - protein, 11 aa, Artificial
  G623_55 CDR-L1
RASPDVATGVA

SEQ ID NO: 218 - protein, 7 aa, Artificial
  G623_55 CDR-L2
SASFLYS

SEQ ID NO: 219 - protein, 9 aa, Artificial
  G623_55 CDR-L3
AQGAGAPAT

SEQ ID NO: 220 - protein, 214 aa, Artificial
  G623_55 LC
DIQMTQSPSSLSASVGDRVTITCRASPDVATGVAWYQQKPGKAPKLLIYSASFLYSGVPSRFSGSGSGTDFTLTISSLQPEDFATYYCAQGAGAPATFGQGTKVEIKRTVAAPSVFIFPPSDEQLKSGTASVVCLLNNFYPREAKVQWKVDNALQSGNSQESVTEQDSKDSTYSLSSTLTLSKADYEKHKVYACEVTHQGLSSPVTKSFNRGEC

SEQ ID NO: 221 - protein, 11 aa, Artificial
  G623_34 CDR-L1
RASQEIASAVA

SEQ ID NO: 222 - protein, 7 aa, Artificial
  G623_34 CDR-L2
SASFLYS

SEQ ID NO: 223 - protein, 9 aa, Artificial
  G623_34 CDR-L3
EQAFSNPLT

SEQ ID NO: 224 - protein, 214 aa, Artificial
  G623_34 LC
DIQMTQSPSSLSASVGDRVTITCRASQEIASAVAWYQQKPGKAPKLLIYSASFLYSGVPSRFSGSGSGTDFTLTISSLQPEDFATYYCEQAFSNPLTFGQGTKVEIKRTVAAPSVFIFPPSDEQLKSGTASVVCLLNNFYPREAKVQWKVDNALQSGNSQESVTEQDSKDSTYSLSSTLTLSKADYEKHKVYACEVTHQGLSSPVTKSFNRGEC

SEQ ID NO: 225 - protein, 11 aa, Artificial
  G623_31 CDR-L1
RASPDVATAVA

SEQ ID NO: 226 - protein, 7 aa, Artificial
  G623_31 CDR-L2
AASFLYS

SEQ ID NO: 227 - protein, 9 aa, Artificial
  G623_31 CDR-L3
AQGYAAPAT

SEQ ID NO: 228 - protein, 214 aa, Artificial
  G623_31 LC
DIQMTQSPSSLSASVGDRVTITCRASPDVATAVAWYQQKPGKAPKLLIYAASFLYSGVPSRFSGSGSGTDFTLTISSLQPEDFATYYCAQGYAAPATFGQGTKVEIKRTVAAPSVFIFPPSDEQLKSGTASVVCLLNNFYPREAKVQWKVDNALQSGNSQESVTEQDSKDSTYSLSSTLTLSKADYEKHKVYACEVTHQGLSSPVTKSFNRGEC

SEQ ID NO: 229 - protein, 11 aa, Artificial
  G623_62 CDR-L1
RASAAVAAAVA

SEQ ID NO: 230 - protein, 7 aa, Artificial
  G623_62 CDR-L2
AASFLSS

SEQ ID NO: 231 - protein, 9 aa, Artificial
  G623_62 CDR-L3
AQSSAAPPT

SEQ ID NO: 232 - protein, 214 aa, Artificial
  G623_62 LC
DIQMTQSPSSLSASVGDRVTITCRASAAVAAAVAWYQQKPGKAPKLLIYAASFLSSGVPSRFSGSGSGTDFTLTISSLQPEDFATYYCAQSSAAPPTFGQGTKVEIKRTVAAPSVFIFPPSDEQLKSGTASVVCLLNNFYPREAKVQWKVDNALQSGNSQESVTEQDSKDSTYSLSSTLTLSKADYEKHKVYACEVTHQGLSSPVTKSFNRGEC

SEQ ID NO: 233 - protein, 11 aa, Artificial
  G623_63 CDR-L1
RASPAASTAVA

SEQ ID NO: 234 - protein, 7 aa, Artificial
  G623_63 CDR-L2
AASFLYS

SEQ ID NO: 235 - protein, 9 aa, Artificial
  G623_63 CDR-L3
AQGYGTPST

SEQ ID NO: 236 - protein, 214 aa, Artificial
  G623_63 LC
DIQMTQSPSSLSASVGDRVTITCRASPAASTAVAWYQQKPGKAPKLLIYAASFLYSGVPSRFSGSGSGTDFTLTISSLQPEDFATYYCAQGYGTPSTFGQGTKVEIKRTVAAPSVFIFPPSDEQLKSGTASVVCLLNNFYPREAKVQWKVDNALQSGNSQESVTEQDSKDSTYSLSSTLTLSKADYEKHKVYACEVTHQGLSSPVTKSFNRGEC

SEQ ID NO: 237 - protein, 11 aa, Artificial
  G623_83 CDR-L1
RASQEISSAVA

SEQ ID NO: 238 - protein, 7 aa, Artificial
  G623_83 CDR-L2
SASFLYS

SEQ ID NO: 239 - protein, 9 aa, Artificial
  G623_83 CDR-L3
QEAYADPLT

SEQ ID NO: 240 - protein, 214 aa, Artificial
  G623_83 LC
DIQMTQSPSSLSASVGDRVTITCRASQEISSAVAWYQQKPGKAPKLLIYSASFLYSGVPSRFSGSGSGTDFTLTISSLQPEDFATYYCQEAYADPLTFGQGTKVEIKRTVAAPSVFIFPPSDEQLKSGTASVVCLLNNFYPREAKVQWKVDNALQSGNSQESVTEQDSKDSTYSLSSTLTLSKADYEKHKVYACEVTHQGLSSPVTKSFNRGEC

SEQ ID NO: 241 - protein, 11 aa, Artificial
  G623_64 CDR-L1
RASQDVSAAVA

SEQ ID NO: 242 - protein, 7 aa, Artificial
  G623_64 CDR-L2
SASFLAS

SEQ ID NO: 243 - protein, 9 aa, Artificial
  G623_64 CDR-L3
AQAAAAPST

SEQ ID NO: 244 - protein, 214 aa, Artificial
  G623_64 LC
DIQMTQSPSSLSASVGDRVTITCRASQDVSAAVAWYQQKPGKAPKLLIYSASFLASGVPSRFSGSGSGTDFTLTISSLQPEDFATYYCAQAAAAPSTFGQGTKVEIKRTVAAPSVFIFPPSDEQLKSGTASVVCLLNNFYPREAKVQWKVDNALQSGNSQESVTEQDSKDSTYSLSSTLTLSKADYEKHKVYACEVTHQGLSSPVTKSFNRGEC

SEQ ID NO: 245 - protein, 11 aa, Artificial
  G623_75 CDR-L1
RASQEVASAVA

SEQ ID NO: 246 - protein, 7 aa, Artificial
  G623_75 CDR-L2
AASYLFS

SEQ ID NO: 247 - protein, 9 aa, Artificial
  G623_75 CDR-L3
EQAFSNPLT

SEQ ID NO: 248 - protein, 214 aa, Artificial
  G623_75 LC
DIQMTQSPSSLSASVGDRVTITCRASQEVASAVAWYQQKPGKAPKLLIYAASYLFSGVPSRFSGSGSGTDFTLTISSLQPEDFATYYCEQAFSNPLTFGQGTKVEIKRTVAAPSVFIFPPSDEQLKSGTASVVCLLNNFYPREAKVQWKVDNALQSGNSQESVTEQDSKDSTYSLSSTLTLSKADYEKHKVYACEVTHQGLSSPVTKSFNRGEC

SEQ ID NO: 249 - protein, 11 aa, Artificial
  G623_27 CDR-L1
RASQEIASAVA

SEQ ID NO: 250 - protein, 7 aa, Artificial
  G623_27 CDR-L2
SASYLYS

SEQ ID NO: 251 - protein, 9 aa, Artificial
  G623_27 CDR-L3
QKAFSDPLT

SEQ ID NO: 252 - protein, 214 aa, Artificial
  G623_27 LC
DIQMTQSPSSLSASVGDRVTITCRASQEIASAVAWYQQKPGKAPKLLIYSASYLYSGVPSRFSGSGSGTDFTLTISSLQPEDFATYYCQKAFSDPLTFGQGTKVEIKRTVAAPSVFIFPPSDEQLKSGTASVVCLLNNFYPREAKVQWKVDNALQSGNSQESVTEQDSKDSTYSLSSTLTLSKADYEKHKVYACEVTHQGLSSPVTKSFNRGEC

SEQ ID NO: 253 - protein, 11 aa, Artificial
  G623_93 CDR-L1
RASQEVASAVA

SEQ ID NO: 254 - protein, 7 aa, Artificial
  G623_93 CDR-L2
SASYLFS

SEQ ID NO: 255 - protein, 9 aa, Artificial
  G623_93 CDR-L3
EQAFANPWT

SEQ ID NO: 256 - protein, 214 aa, Artificial
  G623_93 LC
DIQMTQSPSSLSASVGDRVTITCRASQEVASAVAWYQQKPGKAPKLLIYSASYLFSGVPSRFSGSGSGTDFTLTISSLQPEDFATYYCEQAFANPWTFGQGTKVEIKRTVAAPSVFIFPPSDEQLKSGTASVVCLLNNFYPREAKVQWKVDNALQSGNSQESVTEQDSKDSTYSLSSTLTLSKADYEKHKVYACEVTHQGLSSPVTKSFNRGEC

SEQ ID NO: 257 - protein, 11 aa, Artificial
  G623_53 CDR-L1
RASEAVSAAVA

SEQ ID NO: 258 - protein, 7 aa, Artificial
  G623_53 CDR-L2
AASFLSS

SEQ ID NO: 259 - protein, 9 aa, Artificial
  G623_53 CDR-L3
EQGAGAPGT

SEQ ID NO: 260 - protein, 214 aa, Artificial
  G623_53 LC
DIQMTQSPSSLSASVGDRVTITCRASEAVSAAVAWYQQKPGKAPKLLIYAASFLSSGVPSRFSGSGSGTDFTLTISSLQPEDFATYYCEQGAGAPGTFGQGTKVEIKRTVAAPSVFIFPPSDEQLKSGTASVVCLLNNFYPREAKVQWKVDNALQSGNSQESVTEQDSKDSTYSLSSTLTLSKADYEKHKVYACEVTHQGLSSPVTKSFNRGEC

SEQ ID NO: 261 - protein, 5 aa, Artificial
  G623 CDR-H1
DYWIH

SEQ ID NO: 262 - protein, 17 aa, Artificial
  G623 CDR-H2
GITPAGGYTYYADSVKG

SEQ ID NO: 263 - protein, 11 aa, Artificial
  G623 CDR-H3
FVFFLPYAMDY

SEQ ID NO: 264 - protein, 227 aa, Artificial; identical to SEQ ID NO: 31
  G623 HC

SEQ ID NO: 265 - protein, 5 aa, Artificial
  G623_15 CDR-H1
EYWIH

SEQ ID NO: 266 - protein, 17 aa, Artificial
  G623_15 CDR-H2
GITPAGGYSYYADSVKG

SEQ ID NO: 267 - protein, 11 aa, Artificial
  G623_15 CDR-H3
FVFFLPYAMDY

SEQ ID NO: 268 - protein, 227 aa, Artificial
  G623_15 HC
EVQLVESGGGLVQPGGSLRLSCAASGFTISEYWIHWVRQAPGKGLEWVAGITPAGGYSYYADSVKGRFTISADTSKNTAYLQMNSLRAEDTAVYYCARFVFFLPYAMDYWGQGTLVTVSSASTKGPSVFPLAPSSKSTSGGTAALGCLVKDYFPEPVTVSWNSGALTSGVHTFPAVLQSSGLYSLSSVVTVPSSSLGTQTYICNVNHKPSNTKVDKKVEPKSCDKTH

SEQ ID NO: 269 - protein, 5 aa, Artificial
  G623_69 CDR-H1
EYWIH

SEQ ID NO: 270 - protein, 17 aa, Artificial
  G623_69 CDR-H2
GVTPAGGFSYYADSVKG

SEQ ID NO: 271 - protein, 11 aa, Artificial
  G623_69 CDR-H3
YVFFLPYAMDY

SEQ ID NO: 272 - protein, 227 aa, Artificial
  G623_69 HC
EVQLVESGGGLVQPGGSLRLSCAASGFTIAEYWIHWVRQAPGKGLEWVAGVTPAGGFSYYADSVKGRFTISADTSKNTAYLQMNSLRAEDTAVYYCARYVFFLPYAMDYWGQGTLVTVSSASTKGPSVFPLAPSSKSTSGGTAALGCLVKDYFPEPVTVSWNSGALTSGVHTFPAVLQSSGLYSLSSVVTVPSSSLGTQTYICNVNHKPSNTKVDKKVEPKSCDKTH

SEQ ID NO: 273 - protein, 10 aa, Artificial
  YADS_1 HVL-H1
GFDISYYDIH

SEQ ID NO: 274 - protein, 17 aa, Artificial
  YADS_1 CDR-H2
SIAPYAGATYYADSVKG

SEQ ID NO: 275 - protein, 11 aa, Artificial
  YADS_1 CDR-H3
AADYAYDAMDY

SEQ ID NO: 276 - protein, 250 aa, Artificial
  YADS_1 HC
MKKNIAFLLASMFVFSIATNAYAEVQLVESGGGLVQPGGSLRLSCAASGFDISYYDIHWVRQAPGKGLEWVASIAPYAGATYYADSVKGRFTISADTSKNTAYLQMNSLRAEDTAVYYCSRAADYAYDAMDYWGQGTLVTVSSASTKGPSVFPLAPSSKSTSGGTAALGCLVKDYFPEPVTVSWNSGALTSGVHTFPAVLQSSGLYSLSSVVTVPSSSLGTQTYICNVNHKPSNTKVDKKVEPKSCDKTH

SEQ ID NO: 277 - protein, 10 aa, Artificial
  YADS_2 CDR-H1
GFNITYYSIH

SEQ ID NO: 278 - protein, 17 aa, Artificial
  YADS_2 CDR-H2
TISPTYGSTYYADSVKG

SEQ ID NO: 279 - protein, 11 aa, Artificial
  YADS_2 CDR-H3
SNNYSYYAMDY

SEQ ID NO: 280 - protein, 250 aa, Artificial
  YADS_2 HC
MKKNIAFLLASMFVFSIATNAYAEVQLVESGGGLVQPGGSLRLSCAASGFNITYYSIHWVRQAPGKGLEWVATISPTYGSTYYADSVKGRFTISADTSKNTAYLQMNSLRAEDTAVYYCSRSNNYSYYAMDYWGQGTLVTVSSASTKGPSVFPLAPSSKSTSGGTAALGCLVKDYFPEPVTVSWNSGALTSGVHTFPAVLQSSGLYSLSSVVTVPSSSLGTQTYICNVNHKPSNTKVDKKVEPKSCDKTH

SEQ ID NO: 281 - protein, 10 aa, Artificial
  YADS_3 CDR-H1
GFSISDYDIH

SEQ ID NO: 282 - protein, 17 aa, Artificial
  YADS_3 CDR-H2
AIAPYSGYTYYADSVKG

SEQ ID NO: 283 - protein, 11 aa, Artificial
  YADS_3 CDR-H3
SSYAYYSAMDY

SEQ ID NO: 284 - protein, 250 aa, Artificial
  YADS_3 HC
MKKNIAFLLASMFVFSIATNAYAEVQLVESGGGLVQPGGSLRLSCAASGFSISDYDIHWVRQAPGKGLEWVAAIAPYSGYTYYADSVKGRFTISADTSKNTAYLQMNSLRAEDTAVYYCSRSSYAYYSAMDYWGQGTLVTVSSASTKGPSVFPLAPSSKSTSGGTAALGCLVKDYFPEPVTVSWNSGALTSGVHTFPAVLQSSGLYSLSSVVTVPSSSLGTQTYICNVNHKPSNTKVDKKVEPKSCDKTH

SEQ ID NO: 285 - protein, 10 aa, Artificial
  YADS_4 CDR-H1
GFNIYYYSIH

SEQ ID NO: 286 - protein, 17 aa, Artificial
  YADS_4 CDR-H2
TISPYYGTTYYADSVKG

SEQ ID NO: 287 - protein, 11 aa, Artificial
  YADS_4 CDR-H3
STNTNYYAMDY

SEQ ID NO: 288 - protein, 250 aa, Artificial
  YADS_4 HC
MKKNIAFLLASMFVFSIATNAYAEVQLVESGGGLVQPGGSLRLSCAASGFNIYYYSIHWVRQAPGKGLEWVATISPYYGTTYYADSVKGRFTISADTSKNTAYLQMNSLRAEDTAVYYCSRSTNTNYYAMDYWGQGTLVTVSSASTKGPSVFPLAPSSKSTSGGTAALGCLVKDYFPEPVTVSWNSGALTSGVHTFPAVLQSSGLYSLSSVVTVPSSSLGTQTYICNVNHKPSNTKVDKKVEPKSCDKTH

SEQ ID NO: 289 - protein, 10 aa, Artificial
  YADS_5 CDR-H1
GFAISDYDIH

SEQ ID NO: 290 - protein, 17 aa, Artificial
  YADS_5 CDR-H2
AIAPYYGSTSYADSVKG

SEQ ID NO: 291 - protein, 11 aa, Artificial
  YADS_5 CDR-H3
SSYAYYAAMDY

SEQ ID NO: 292 - protein, 250 aa, Artificial
  YADS_5 HC
MKKNIAFLLASMFVFSIATNAYAEVQLVESGGGLVQPGGSLRLSCAASGFAISDYDIHWVRQAPGKGLEWVAAIAPYYGSTSYADSVKGRFTISADTSKNTAYLQMNSLRAEDTAVYYCSRSSYAYYAAMDYWGQGTLVTVSSASTKGPSVFPLAPSSKSTSGGTAALGCLVKDYFPEPVTVSWNSGALTSGVHTFPAVLQSSGLYSLSSVVTVPSSSLGTQTYICNVNHKPSNTKVDKKVEPKSCDKTH

SEQ ID NO: 293 - protein, 10 aa, Artificial
  YADS_6 CDR-H1
GFSIYDYDIH

SEQ ID NO: 294 - protein, 17 aa, Artificial
  YADS_6 CDR-H2
SIYPAYGSTAYADSVKG

SEQ ID NO: 295 - protein, 11 aa, Artificial
  YADS_6 CDR-H3
GAAYAYDAMDY

SEQ ID NO: 296 - protein, 250 aa, Artificial
  YADS_6 HC
MKKNIAFLLASMFVFSIATNAYAEVQLVESGGGLVQPGGSLRLSCAASGFSIYDYDIHWVRQAPGKGLEWVASIYPAYGSTAYADSVKGRFTISADTSKNTAYLQMNSLRAEDTAVYYCSRGAAYAYDAMDYWGQGTLVTVSSASTKGPSVFPLAPSSKSTSGGTAALGCLVKDYFPEPVTVSWNSGALTSGVHTFPAVLQSSGLYSLSSVVTVPSSSLGTQTYICNVNHKPSNTKVDKKVEPKSCDKTH

SEQ ID NO: 297 - protein, 10 aa, Artificial
  YADS_7 CDR-H1
GFSIDYYAIH

SEQ ID NO: 298 - protein, 17 aa, Artificial
  YADS_7 CDR-H2
SIAPYAGYTYYADSVKG

SEQ ID NO: 299 - protein, 11 aa, Artificial
  YADS_7 CDR-H3
AAAYYYDAMDY

SEQ ID NO: 300 - protein, 250 aa, Artificial
  YADS_7 HC
MKKNIAFLLASMFVFSIATNAYAEVQLVESGGGLVQPGGSLRLSCAASGFSIDYYAIHWVRQAPGKGLEWVASIAPYAGYTYYADSVKGRFTISADTSKNTAYLQMNSLRAEDTAVYYCSRAAAYYYDAMDYWGQGTLVTVSSASTKGPSVFPLAPSSKSTSGGTAALGCLVKDYFPEPVTVSWNSGALTSGVHTFPAVLQSSGLYSLSSVVTVPSSSLGTQTYICNVNHKPSNTKVDKKVEPKSCDKTH

SEQ ID NO: 301 - protein, 10 aa, Artificial
  YADS_8 CDR-H1
GFSIAYYDIH

SEQ ID NO: 302 - protein, 17 aa, Artificial
  YADS_8 CDR-H2
SIAPYAGATDYADSVKG

SEQ ID NO: 303 - protein, 11 aa, Artificial
  YADS_8 CDR-H3
SSYAYASAMDY

SEQ ID NO: 304 - protein, 250 aa, Artificial
  YADS_8 HC
MKKNIAFLLASMFVFSIATNAYAEVQLVESGGGLVQPGGSLRLSCAASGFSIAYYDIHWVRQAPGKGLEWVASIAPYAGATDYADSVKGRFTISADTSKNTAYLQMNSLRAEDTAVYYCSRSSYAYASAMDYWGQGTLVTVSSASTKGPSVFPLAPSSKSTSGGTAALGCLVKDYFPEPVTVSWNSGALTSGVHTFPAVLQSSGLYSLSSVVTVPSSSLGTQTYICNVNHKPSNTKVDKKVEPKSCDKTH

SEQ ID NO: 305 - protein, 10 aa, Artificial
  YADS_9 CDR-H1
GFDIYDYAIH

SEQ ID NO: 306 - protein, 17 aa, Artificial
  YADS_9 CDR-H2
SIAPYAGSTYYADSVKG

SEQ ID NO: 307 - protein, 11 aa, Artificial
  YADS_9 CDR-H3
DSYAYYAAMDY

SEQ ID NO: 308 - protein, 250 aa, Artificial
  YADS_9 HC
MKKNIAFLLASMFVFSIATNAYAEVQLVESGGGLVQPGGSLRLSCAASGFDIYDYAIHWVRQAPGKGLEWVASIAPYAGSTYYADSVKGRFTISADTSKNTAYLQMNSLRAEDTAVYYCSRDSYAYYAAMDYWGQGTLVTVSSASTKGPSVFPLAPSSKSTSGGTAALGCLVKDYFPEPVTVSWNSGALTSGVHTFPAVLQSSGLYSLSSVVTVPSSSLGTQTYICNVNHKPSNTKVDKKVEPKSCDKTH

SEQ ID NO: 309 - protein, 10 aa, Artificial
  YADS_10 CDR-H1
GFDISASDIH

SEQ ID NO: 310 - protein, 17 aa, Artificial
  YADS_10CDR-H2
SISPYAGYTAYADSVKG

SEQ ID NO: 311 - protein, 11 aa, Artificial
  YADS_10 CDR-H3
SAYYAASAMDY

SEQ ID NO: 312 - protein, 250 aa, Artificial
  YADS_10 HC
MKKNIAFLLASMFVFSIATNAYAEVQLVESGGGLVQPGGSLRLSCAASGFDISASDIHWVRQAPGKGLEWVASISPYAGYTAYADSVKGRFTISADTSKNTAYLQMNSLRAEDTAVYYCSRSAYYAASAMDYWGQGTLVTVSSASTKGPSVFPLAPSSKSTSGGTAALGCLVKDYFPEPVTVSWNSGALTSGVHTFPAVLQSSGLYSLSSVVTVPSSSLGTQTYICNVNHKPSNTKVDKKVEPKSCDKTH

SEQ ID NO: 313 - protein, 10 aa, Artificial
  YADS_11 CDR-H1
GFDIAYYDIH

SEQ ID NO: 314 - protein, 17 aa, Artificial
  YADS_11CDR-H2
SIAPYAGSTAYADSVKG

SEQ ID NO: 315 - protein, 11 aa, Artificial
  YADS_11 CDR-H3
AAAAYAYAMDY

SEQ ID NO: 316 - protein, 250 aa, Artificial
  YADS_11 HC
MKKNIAFLLASMFVFSIATNAYAEVQLVESGGGLVQPGGSLRLSCAASGFDIAYYDIHWVRQAPGKGLEWVASIAPYAGSTAYADSVKGRFTISADTSKNTAYLQMNSLRAEDTAVYYCSRAAAAYAYAMDYWGQGTLVTVSSASTKGPSVFPLAPSSKSTSGGTAALGCLVKDYFPEPVTVSWNSGALTSGVHTFPAVLQSSGLYSLSSVVTVPSSSLGTQTYICNVNHKPSNTKVDKKVEPKSCDKTH

SEQ ID NO: 317 - protein, 10 aa, Artificial
  YADS_12 CDR-H1
GFAIDYYDIH

SEQ ID NO: 318 - protein, 17 aa, Artificial
  YADS_12CDR-H2
SIAPYAGSTYYADSVKG

SEQ ID NO: 319 - protein, 11 aa, Artificial
  YADS_12 CDR-H3
SAAYYAYAMDY

SEQ ID NO: 320 - protein, 250 aa, Artificial
  YADS_12 HC
MKKNIAFLLASMFVFSIATNAYAEVQLVESGGGLVQPGGSLRLSCAASGFAIDYYDIHWVRQAPGKGLEWVASIAPYAGSTYYADSVKGRFTISADTSKNTAYLQMNSLRAEDTAVYYCSRSAAYYAYAMDYWGQGTLVTVSSASTKGPSVFPLAPSSKSTSGGTAALGCLVKDYFPEPVTVSWNSGALTSGVHTFPAVLQSSGLYSLSSVVTVPSSSLGTQTYICNVNHKPSNTKVDKKVEPKSCDKTH

SEQ ID NO: 321 - protein, 10 aa, Artificial
  YADS_13 CDR-H1
GFAIAYDDIH

SEQ ID NO: 322 - protein, 17 aa, Artificial
  YADS_13 CDR-H2
SIAPYAGATAYADSVKG

SEQ ID NO: 323 - protein, 11 aa, Artificial
  YADS_13 CDR-H3
AAAYAAYAMDY

SEQ ID NO: 324 - protein, 250 aa, Artificial
  YADS_13 HC
MKKNIAFLLASMFVFSIATNAYAEVQLVESGGGLVQPGGSLRLSCAASGFAIAYDDIHWVRQAPGKGLEWVASIAPYAGATAYADSVKGRFTISADTSKNTAYLQMNSLRAEDTAVYYCSRAAAYAAYAMDYWGQGTLVTVSSASTKGPSVFPLAPSSKSTSGGTAALGCLVKDYFPEPVTVSWNSGALTSGVHTFPAVLQSSGLYSLSSVVTVPSSSLGTQTYICNVNHKPSNTKVDKKVEPKSCDKTH

SEQ ID NO: 325 - protein, 10 aa, Artificial
  YADS_14 CDR-H1
GFAIAAYDIH

SEQ ID NO: 326 - protein, 17 aa, Artificial
  YADS_14 CDR-H2
SISPYAGATSYADSVKG

SEQ ID NO: 327 - protein, 11 aa, Artificial
  YADS_14 CDR-H3
AAAYYYDAMDY

SEQ ID NO: 328 - protein, 250 aa, Artificial
  YADS_14 HC
MKKNIAFLLASMFVFSIATNAYAEVQLVESGGGLVQPGGSLRLSCAASGFAIAAYDIHWVRQAPGKGLEWVASISPYAGATSYADSVKGRFTISADTSKNTAYLQMNSLRAEDTAVYYCSRAAAYYYDAMDYWGQGTLVTVSSASTKGPSVFPLAPSSKSTSGGTAALGCLVKDYFPEPVTVSWNSGALTSGVHTFPAVLQSSGLYSLSSVVTVPSSSLGTQTYICNVNHKPSNTKVDKKVEPKSCDKTH

SEQ ID NO: 329 - protein, 10 aa, Artificial
  YADS_15 CDR-H1
GFYIADAAIH

SEQ ID NO: 330 - protein, 17 aa, Artificial
  YADS_15 CDR-H2
SIYPSAGATYYADSVKG

SEQ ID NO: 331 - protein, 11 aa, Artificial
  YADS_15 CDR-H3
AYDSDYYAMDY

SEQ ID NO: 332 - protein, 250 aa, Artificial
  YADS_15 HC
MKKNIAFLLASMFVFSIATNAYAEVQLVESGGGLVQPGGSLRLSCAASGFYIADAAIHWVRQAPGKGLEWVASIYPSAGATYYADSVKGRFTISADTSKNTAYLQMNSLRAEDTAVYYCSRAYDSDYYAMDYWGQGTLVTVSSASTKGPSVFPLAPSSKSTSGGTAALGCLVKDYFPEPVTVSWNSGALTSGVHTFPAVLQSSGLYSLSSVVTVPSSSLGTQTYICNVNHKPSNTKVDKKVEPKSCDKTH

SEQ ID NO: 333 - protein, 10 aa, Artificial
  YADS_16 CDR-H1
GFAIYDYDIH

SEQ ID NO: 334 - protein, 17 aa, Artificial
  YADS_16 CDR-H2
DIAPYAGATAYADSVKG

SEQ ID NO: 335 - protein, 11 aa, Artificial
  YADS_16 CDR-H3
SSYAYYAAMDY

SEQ ID NO: 336 - protein, 250 aa, Artificial
  YADS_16 HC
MKKNIAFLLASMFVFSIATNAYAEVQLVESGGGLVQPGGSLRLSCAASGFAIYDYDIHWVRQAPGKGLEWVADIAPYAGATAYADSVKGRFTISADTSKNTAYLQMNSLRAEDTAVYYCSRSSYAYYAAMDYWGQGTLVTVSSASTKGPSVFPLAPSSKSTSGGTAALGCLVKDYFPEPVTVSWNSGALTSGVHTFPAVLQSSGLYSLSSVVTVPSSSLGTQTYICNVNHKPSNTKVDKKVEPKSCDKTH

SEQ ID NO: 337 - protein, 10 aa, Artificial
  YADS_17 CDR-H1
GFDIYDYSIH

SEQ ID NO: 338 - protein, 17 aa, Artificial
  YADS_17 CDR-H2
YISPYSGATAYADSVKG

SEQ ID NO: 339 - protein, 11 aa, Artificial
  YADS_17 CDR-H3
SSYAYYDAMDY

SEQ ID NO: 340 - protein, 250 aa, Artificial
  YADS_17 HC
MKKNIAFLLASMFVFSIATNAYAEVQLVESGGGLVQPGGSLRLSCAASGFDIYDYSIHWVRQAPGKGLEWVAYISPYSGATAYADSVKGRFTISADTSKNTAYLQMNSLRAEDTAVYYCSRSSYAYYDAMDYWGQGTLVTVSSASTKGPSVFPLAPSSKSTSGGTAALGCLVKDYFPEPVTVSWNSGALTSGVHTFPAVLQSSGLYSLSSVVTVPSSSLGTQTYICNVNHKPSNTKVDKKVEPKSCDKTH

SEQ ID NO: 341 - protein, 10 aa, Artificial
  YADS_18 CDR-H1
GFAIAAYAIH

SEQ ID NO: 342 - protein, 17 aa, Artificial
  YADS_18 CDR-H2
DIYPAAGDTAYADSVKG

SEQ ID NO: 343 - protein, 13 aa, Artificial
  YADS_18 CDR-H3
SYYYSYSSYAMDY

SEQ ID NO: 344 - protein, 252 aa, Artificial
  YADS_18 HC
MKKNIAFLLASMFVFSIATNAYAEVQLVESGGGLVQPGGSLRLSCAASGFAIAAYAIHWVRQAPGKGLEWVADIYPAAGDTAYADSVKGRFTISADTSKNTAYLQMNSLRAEDTAVYYCSRSYYYSYSSYAMDYWGQGTLVTVSSASTKGPSVFPLAPSSKSTSGGTAALGCLVKDYFPEPVTVSWNSGALTSGVHTFPAVLQSSGLYSLSSVVTVPSSSLGTQTYICNVNHKPSNTKVDKKVEPKSCDKTH

SEQ ID NO: 345 - protein, 17 aa, Artificial
  YADS_19 CDR-H2
DIYPASGYTSYADSVKG

SEQ ID NO: 346 - protein, 12 aa, Artificial
  YADS_19 CDR-H3
AYDYYAAVAMDY

SEQ ID NO: 347 - protein, 10 aa, Artificial
  YADS_20 HVL-H1
GFDISAYAIH

SEQ ID NO: 348 - protein, 17 aa, Artificial
  YADS_20 CDR-H2
YISPSSGATAYADSVKG

SEQ ID NO: 349 - protein, 11 aa, Artificial
  YADS_20 CDR-H3
SAYYSYAAMDY

SEQ ID NO: 350 - protein, 250 aa, Artificial
  YADS_20 HC
MKKNIAFLLASMFVFSIATNAYAEVQLVESGGGLVQPGGSLRLSCAASGFDISAYAIHWVRQAPGKGLEWVAYISPSSGATAYADSVKGRFTISADTSKNTAYLQMNSLRAEDTAVYYCSRSAYYSYAAMDYWGQGTLVTVSSASTKGPSVFPLAPSSKSTSGGTAALGCLVKDYFPEPVTVSWNSGALTSGVHTFPAVLQSSGLYSLSSVVTVPSSSLGTQTYICNVNHKPSNTKVDKKVEPKSCDKTH

SEQ ID NO: 351 - protein, 17 aa, Artificial
  YADS_21 CDR-H2
SIAPYYGATAYADSVKG

SEQ ID NO: 352 - protein, 11 aa, Artificial
  YADS_21 CDR-H3
AAYSYYSAMDY

SEQ ID NO: 353 - protein, 16 aa, Artificial
  YADS_22 CDR-H2
SISPYSGYTAYADSVK

SEQ ID NO: 354 - protein, 12 aa, Artificial
  YADS_22 CDR-H3
AYYYYYYAAMDY

SEQ ID NO: 355 - protein, 10 aa, Artificial
  YADS_23 CDR-H1
GFDIYDDDIH

SEQ ID NO: 356 - protein, 17 aa, Artificial
  YADS_23 CDR-H2
YIAPSYGYTDYADSVKG

SEQ ID NO: 357 - protein, 13 aa, Artificial
  YADS_23 CDR-H3
SSDASYSYSAMDY

SEQ ID NO: 358 - protein, 252 aa, Artificial
  YADS_23 HC
MKKNIAFLLASMFVFSIATNAYAEVQLVESGGGLVQPGGSLRLSCAASGFDIYDDDIHWVRQAPGKGLEWVAYIAPSYGYTDYADSVKGRFTISADTSKNTAYLQMNSLRAEDTAVYYCSRSSDASYSYSAMDYWGQGTLVTVSSASTKGPSVFPLAPSSKSTSGGTAALGCLVKDYFPEPVTVSWNSGALTSGVHTFPAVLQSSGLYSLSSVVTVPSSSLGTQTYICNVNHKPSNTKVDKKVEPKSCDKTH

SEQ ID NO: 359 - protein, 17 aa, Artificial
  YADS_24 CDR-H2
SIYPSSGDTYYADSVKG

SEQ ID NO: 360 - protein, 12 aa, Artificial
  YADS_24 CDR-H3
DVSYSSYYAMDY

SEQ ID NO: 361 - protein, 11 aa, Artificial
  G6 CDR-L1
RASQDVSTAVA

SEQ ID NO: 362 - protein, 7 aa, Artificial
  G6 CDR-L2
SASFLYS

SEQ ID NO: 363 - protein, 9 aa, Artificial
  G6 CDR-L3
QQSYTTPPT

SEQ ID NO: 364 - protein, 214 aa, Artificial; identical to SEQ ID NO: 28
  G6 LC

SEQ ID NO: 365 - protein, 11 aa, Artificial
  G6_72 CDR-L1
RASQDVASSVA

SEQ ID NO: 366 - protein, 7 aa, Artificial
  G6_72 CDR-L2
AASFLYS

SEQ ID NO: 367 - protein, 9 aa, Artificial
  G6_72 CDR-L3
KQAFSSPPT

SEQ ID NO: 368 - protein, 214 aa, Artificial
  G6_72 LC
DIQMTQSPSSLSASVGDRVTITCRASQDVASSVAWYQQKPGKAPKLLIYAASFLYSGVPSRFSGSGSGTDFTLTISSLQPEDFATYYCKQAFSSPPTFGQGTKVEIKRTVAAPSVFIFPPSDEQLKSGTASVVCLLNNFYPREAKVQWKVDNALQSGNSQESVTEQDSKDSTYSLSSTLTLSKADYEKHKVYACEVTHQGLSSPVTKSFNRGEC

SEQ ID NO: 369 - protein, 11 aa, Artificial
  G6_14 CDR-L1
RASQDVATSVA

SEQ ID NO: 370 - protein, 7 aa, Artificial
  G6_14 CDR-L2
AASFLYS

SEQ ID NO: 371 - protein, 9 aa, Artificial
  G6_14 CDR-L3
EQAFTSPPT

SEQ ID NO: 372 - protein, 214 aa, Artificial
  G6_14 LC
DIQMTQSPSSLSASVGDRVTITCRASQDVATSVAWYQQKPGKAPKLLIYAASFLYSGVPSRFSGSGSGTDFTLTISSLQPEDFATYYCEQAFTSPPTFGQGTKVEIKRTVAAPSVFIFPPSDEQLKSGTASVVCLLNNFYPREAKVQWKVDNALQSGNSQESVTEQDSKDSTYSLSSTLTLSKADYEKHKVYACEVTHQGLSSPVTKSFNRGEC

SEQ ID NO: 373 - protein, 11 aa, Artificial
  G6_43 CDR-L1
RASQDVSSAVA

SEQ ID NO: 374 - protein, 7 aa, Artificial
  G6_43 CDR-L2
SASYLYS

SEQ ID NO: 375 - protein, 9 aa, Artificial
  G6_43 CDR-L3
QEAFTSPPT

SEQ ID NO: 376 - protein, 214 aa, Artificial
  G6_43 LC
DIQMTQSPSSLSASVGDRVTITCRASQDVSSAVAWYQQKPGKAPKLLIYSASYLYSGVPSRFSGSGSGTDFTLTISSLQPEDFATYYCQEAFTSPPTFGQGTKVEIKRTVAAPSVFIFPPSDEQLKSGTASVVCLLNNFYPREAKVQWKVDNALQSGNSQESVTEQDSKDSTYSLSSTLTLSKADYEKHKVYACEVTHQGLSSPVTKSFNRGEC

SEQ ID NO: 377 - protein, 11 aa, Artificial
  G6_54 CDR-L1
RASEEVATSVA

SEQ ID NO: 378 - protein, 7 aa, Artificial
  G6_54 CDR-L2
AASYLYS

SEQ ID NO: 379 - protein, 9 aa, Artificial
  G6_54 CDR-L3
EEAFTSPPT

SEQ ID NO: 380 - protein, 214 aa, Artificial
  G6_54 LC
DIQMTQSPSSLSASVGDRVTITCRASEEVATSVAWYQQKPGKAPKLLIYAASYLYSGVPSRFSGSGSGTDFTLTISSLQPEDFATYYCEEAFTSPPTFGQGTKVEIKRTVAAPSVFIFPPSDEQLKSGTASVVCLLNNFYPREAKVQWKVDNALQSGNSQESVTEQDSKDSTYSLSSTLTLSKADYEKHKVYACEVTHQGLSSPVTKSFNRGEC

SEQ ID NO: 381 - protein, 11 aa, Artificial
  G6_5 CDR-L1
RASQDVATAVA

SEQ ID NO: 382 - protein, 7 aa, Artificial
  G6_5 CDR-L2
SASYLYS

SEQ ID NO: 383 - protein, 9 aa, Artificial
  G6_5 CDR-L3
EEAYTSPPT

SEQ ID NO: 384 - protein, 214 aa, Artificial
  G6_5 LC
DIQMTQSPSSLSASVGDRVTITCRASQDVATAVAWYQQKPGKAPKLLIYSASYLYSGVPSRFSGSGSGTDFTLTISSLQPEDFATYYCEEAYTSPPTFGQGTKVEIKRTVAAPSVFIFPPSDEQLKSGTASVVCLLNNFYPREAKVQWKVDNALQSGNSQESVTEQDSKDSTYSLSSTLTLSKADYEKHKVYACEVTHQGLSSPVTKSFNRGEC

SEQ ID NO: 385 - protein, 11 aa, Artificial
  G6_44 CDR-L1
RASQDVASSVA

SEQ ID NO: 386 - protein, 7 aa, Artificial
  G6_44 CDR-L2
AASYLYS

SEQ ID NO: 387 - protein, 9 aa, Artificial
  G6_44 CDR-L3
QEAFTSPPT

SEQ ID NO: 388 - protein, 214 aa, Artificial
  G6_44 LC
DIQMTQSPSSLSASVGDRVTITCRASQDVASSVAWYQQKPGKAPKLLIYAASYLYSGVPSRFSGSGSGTDFTLTISSLQPEDFATYYCQEAFTSPPTFGQGTKVEIKRTVAAPSVFIFPPSDEQLKSGTASVVCLLNNFYPREAKVQWKVDNALQSGNSQESVTEQDSKDSTYSLSSTLTLSKADYEKHKVYACEVTHQGLSSPVTKSFNRGEC

SEQ ID NO: 389 - protein, 11 aa, Artificial
  G6_83 CDR-L1
RASQEVASAVA

SEQ ID NO: 390 - protein, 7 aa, Artificial
  G6_83 CDR-L2
SASFLYS

SEQ ID NO: 391 - protein, 9 aa, Artificial
  G6_83 CDR-L3
QQAYSSPAT

SEQ ID NO: 392 - protein, 214 aa, Artificial
  G6_83 LC
DIQMTQSPSSLSASVGDRVTITCRASQEVASAVAWYQQKPGKAPKLLIYSASFLYSGVPSRFSGSGSGTDFTLTISSLQPEDFATYYCQQAYSSPATFGQGTKVEIKRTVAAPSVFIFPPSDEQLKSGTASVVCLLNNFYPREAKVQWKVDNALQSGNSQESVTEQDSKDSTYSLSSTLTLSKADYEKHKVYACEVTHQGLSSPVTKSFNRGEC

SEQ ID NO: 393 - protein, 11 aa, Artificial
  G6_78 CDR-L1
RASQDVSTAVA

SEQ ID NO: 394 - protein, 7 aa, Artificial
  G6_78 CDR-L2
SASFLYS

SEQ ID NO: 395 - protein, 9 aa, Artificial
  G6_78 CDR-L3
KQAFSSPPT

SEQ ID NO: 396 - protein, 214 aa, Artificial
  G6_78 LC
DIQMTQSPSSLSASVGDRVTITCRASQDVSTAVAWYQQKPGKAPKLLIYSASFLYSGVPSRFSGSGSGTDFTLTISSLQPEDFATYYCKQAFSSPPTFGQGTKVEIKRTVAAPSVFIFPPSDEQLKSGTASVVCLLNNFYPREAKVQWKVDNALQSGNSQESVTEQDSKDSTYSLSSTLTLSKADYEKHKVYACEVTHQGLSSPVTKSFNRGEC

SEQ ID NO: 397 - protein, 11 aa, Artificial
  G6_46 CDR-L1
RASEDISTAVA

SEQ ID NO: 398 - protein, 7 aa, Artificial
  G6_46 CDR-L2
SASFLFS

SEQ ID NO: 399 - protein, 9 aa, Artificial
  G6_46 CDR-L3
QQAFTTPPT

SEQ ID NO: 400 - protein, 214 aa, Artificial
  G6_46 LC
DIQMTQSPSSLSASVGDRVTITCRASEDISTAVAWYQQKPGKAPKLLIYSASFLFSGVPSRFSGSGSGTDFTLTISSLQPEDFATYYCQQAFTTPPTFGQGTKVEIKRTVAAPSVFIFPPSDEQLKSGTASVVCLLNNFYPREAKVQWKVDNALQSGNSQESVTEQDSKDSTYSLSSTLTLSKADYEKHKVYACEVTHQGLSSPVTKSFNRGEC

SEQ ID NO: 401 - protein, 11 aa, Artificial
  G6_57 CDR-L1
RASQEISTSVA

SEQ ID NO: 402 - protein, 7 aa, Artificial
  G6_57 CDR-L2
AASYLYS

SEQ ID NO: 403 - protein, 9 aa, Artificial
  G6_57 CDR-L3
QQAFSSPPT

SEQ ID NO: 404 - protein, 214 aa, Artificial
  G6_57 LC
DIQMTQSPSSLSASVGDRVTITCRASQEISTSVAWYQQKPGKAPKLLIYAASYLYSGVPSRFSGSGSGTDFTLTISSLQPEDFATYYCQQAFSSPPTFGQGTKVEIKRTVAAPSVFIFPPSDEQLKSGTASVVCLLNNFYPREAKVQWKVDNALQSGNSQESVTEQDSKDSTYSLSSTLTLSKADYEKHKVYACEVTHQGLSSPVTKSFNRGEC

SEQ ID NO: 405 - protein, 11 aa, Artificial
  G6_61 CDR-L1
RASQDVASSVA

SEQ ID NO: 406 - protein, 7 aa, Artificial
  G6_61 CDR-L2
AASYLYS

SEQ ID NO: 407 - protein, 9 aa, Artificial
  G6_61 CDR-L3
EQAYSSPPT

SEQ ID NO: 408 - protein, 214 aa, Artificial
  G6_61 LC
DIQMTQSPSSLSASVGDRVTITCRASQDVASSVAWYQQKPGKAPKLLIYAASYLYSGVPSRFSGSGSGTDFTLTISSLQPEDFATYYCEQAYSSPPTFGQGTKVEIKRTVAAPSVFIFPPSDEQLKSGTASVVCLLNNFYPREAKVQWKVDNALQSGNSQESVTEQDSKDSTYSLSSTLTLSKADYEKHKVYACEVTHQGLSSPVTKSFNRGEC

SEQ ID NO: 409 - protein, 11 aa, Artificial
  G6_16 CDR-L1
RASEDVSTSVA

SEQ ID NO: 410 - protein, 7 aa, Artificial
  G6_16 CDR-L2
AASYLYS

SEQ ID NO: 411 - protein, 9 aa, Artificial
  G6_16 CDR-L3
EQAFTNPPT

SEQ ID NO: 412 - protein, 214 aa, Artificial
  G6_16 LC
DIQMTQSPSSLSASVGDRVTITCRASEDVSTSVAWYQQKPGKAPKLLIYAASYLYSGVPSRFSGSGSGTDFTLTISSLQPEDFATYYCEQAFTNPPTFGQGTKVEIKRTVAAPSVFIFPPSDEQLKSGTASVVCLLNNFYPREAKVQWKVDNALQSGNSQESVTEQDSKDSTYSLSSTLTLSKADYEKHKVYACEVTHQGLSSPVTKSFNRGEC

SEQ ID NO: 413 - protein, 11 aa, Artificial
  G6_71 CDR-L1
RASQDVATAVA

SEQ ID NO: 414 - protein, 7 aa, Artificial
  G6_71 CDR-L2
SASFLFS

SEQ ID NO: 415 - protein, 9 aa, Artificial
  G6_71 CDR-L3
EEAYTSPPT

SEQ ID NO: 416 - protein, 214 aa, Artificial
  G6_71 LC
DIQMTQSPSSLSASVGDRVTITCRASQDVATAVAWYQQKPGKAPKLLIYSASFLFSGVPSRFSGSGSGTDFTLTISSLQPEDFATYYCEEAYTSPPTFGQGTKVEIKRTVAAPSVFIFPPSDEQLKSGTASVVCLLNNFYPREAKVQWKVDNALQSGNSQESVTEQDSKDSTYSLSSTLTLSKADYEKHKVYACEVTHQGLSSPVTKSFNRGEC

SEQ ID NO: 417 - protein, 11 aa, Artificial
  G6_85 CDR-L1
RASEDIASSVA

SEQ ID NO: 418 - protein, 7 aa, Artificial
  G6_85 CDR-L2
AASYLFS

SEQ ID NO: 419 - protein, 9 aa, Artificial
  G6_85 CDR-L3
QQAFSSPPT

SEQ ID NO: 420 - protein, 214 aa, Artificial
  G6_85 LC
DIQMTQSPSSLSASVGDRVTITCRASEDIASSVAWYQQKPGKAPKLLIYAASYLFSGVPSRFSGSGSGTDFTLTISSLQPEDFATYYCQQAFSSPPTFGQGTKVEIKRTVAAPSVFIFPPSDEQLKSGTASVVCLLNNFYPREAKVQWKVDNALQSGNSQESVTEQDSKDSTYSLSSTLTLSKADYEKHKVYACEVTHQGLSSPVTKSFNRGEC

SEQ ID NO: 421 - protein, 11 aa, Artificial
  G6_58 CDR-L1
RASEEVSTAVA

SEQ ID NO: 422 - protein, 7 aa, Artificial
  G6_58 CDR-L2
AASFLYS

SEQ ID NO: 423 - protein, 9 aa, Artificial
  G6_58 CDR-L3
QQAFTSPAT

SEQ ID NO: 424 - protein, 214 aa, Artificial
  G6_58 LC
DIQMTQSPSSLSASVGDRVTITCRASEEVSTAVAWYQQKPGKAPKLLIYAASFLYSGVPSRFSGSGSGTDFTLTISSLQPEDFATYYCQQAFTSPATFGQGTKVEIKRTVAAPSVFIFPPSDEQLKSGTASVVCLLNNFYPREAKVQWKVDNALQSGNSQESVTEQDSKDSTYSLSSTLTLSKADYEKHKVYACEVTHQGLSSPVTKSFNRGEC

SEQ ID NO: 425 - protein, 11 aa, Artificial
  G6_67 CDR-L1
RASQEISSSVA

SEQ ID NO: 426 - protein, 7 aa, Artificial
  G6_67 CDR-L2
SASYLYS

SEQ ID NO: 427 - protein, 9 aa, Artificial
  G6_67 CDR-L3
QEAFTTPPT

SEQ ID NO: 428 - protein, 214 aa, Artificial
  G6_67 LC
DIQMTQSPSSLSASVGDRVTITCRASQEISSSVAWYQQKPGKAPKLLIYSASYLYSGVPSRFSGSGSGTDFTLTISSLQPEDFATYYCQEAFTTPPTFGQGTKVEIKRTVAAPSVFIFPPSDEQLKSGTASVVCLLNNFYPREAKVQWKVDNALQSGNSQESVTEQDSKDSTYSLSSTLTLSKADYEKHKVYACEVTHQGLSSPVTKSFNRGEC

SEQ ID NO: 429 - protein, 11 aa, Artificial
  G6_53 CDR-L1
RASEDIASSVA

SEQ ID NO: 430 - protein, 7 aa, Artificial
  G6_53 CDR-L2
SASYLYS

SEQ ID NO: 431 - protein, 9 aa, Artificial
  G6_53 CDR-L3
EESFSTPPT

SEQ ID NO: 432 - protein, 214 aa, Artificial
  G6_53 LC
DIQMTQSPSSLSASVGDRVTITCRASEDIASSVAWYQQKPGKAPKLLIYSASYLYSGVPSRFSGSGSGTDFTLTISSLQPEDFATYYCEESFSTPPTFGQGTKVEIKRTVAAPSVFIFPPSDEQLKSGTASVVCLLNNFYPREAKVQWKVDNALQSGNSQESVTEQDSKDSTYSLSSTLTLSKADYEKHKVYACEVTHQGLSSPVTKSFNRGEC

SEQ ID NO: 433 - protein, 11 aa, Artificial
  G6_50 CDR-L1
RASQDISSSVA

SEQ ID NO: 434 - protein, 7 aa, Artificial
  G6_50 CDR-L2
AASFLYS

SEQ ID NO: 435 - protein, 9 aa, Artificial
  G6_50 CDR-L3
QQAFTSPPT

SEQ ID NO: 436 - protein, 214 aa, Artificial
  G6_50 LC
DIQMTQSPSSLSASVGDRVTITCRASQDISSSVAWYQQKPGKAPKLLIYAASFLYSGVPSRFSGSGSGTDFTLTISSLQPEDFATYYCQQAFTSPPTFGQGTKVEIKRTVAAPSVFIFPPSDEQLKSGTASVVCLLNNFYPREAKVQWKVDNALQSGNSQESVTEQDSKDSTYSLSSTLTLSKADYEKHKVYACEVTHQGLSSPVTKSFNRGEC

SEQ ID NO: 437 - protein, 11 aa, Artificial
  G6_56 CDR-L1
RASEDVSTSVA

SEQ ID NO: 438 - protein, 7 aa, Artificial
  G6_56 CDR-L2
AASYLYS

SEQ ID NO: 439 - protein, 9 aa, Artificial
  G6_56 CDR-L3
EEAFTTPPT

SEQ ID NO: 440 - protein, 214 aa, Artificial
  G6_56 LC
DIQMTQSPSSLSASVGDRVTITCRASEDVSTSVAWYQQKPGKAPKLLIYAASYLYSGVPSRFSGSGSGTDFTLTISSLQPEDFATYYCEEAFTTPPTFGQGTKVEIKRTVAAPSVFIFPPSDEQLKSGTASVVCLLNNFYPREAKVQWKVDNALQSGNSQESVTEQDSKDSTYSLSSTLTLSKADYEKHKVYACEVTHQGLSSPVTKSFNRGEC

SEQ ID NO: 441 - protein, 11 aa, Artificial
  G6_32 CDR-L1
RASQDISSSVA

SEQ ID NO: 442 - protein, 7 aa, Artificial
  G6_32 CDR-L2
SASYLYS

SEQ ID NO: 443 - protein, 9 aa, Artificial
  G6_32 CDR-L3
KQSYSSPPT

SEQ ID NO: 444 - protein, 214 aa, Artificial
  G6_32 LC
DIQMTQSPSSLSASVGDRVTITCRASQDISSSVAWYQQKPGKAPKLLIYSASYLYSGVPSRFSGSGSGTDFTLTISSLQPEDFATYYCKQSYSSPPTFGQGTKVEIKRTVAAPSVFIFPPSDEQLKSGTASVVCLLNNFYPREAKVQWKVDNALQSGNSQESVTEQDSKDSTYSLSSTLTLSKADYEKHKVYACEVTHQGLSSPVTKSFNRGEC

SEQ ID NO: 445 - protein, 11 aa, Artificial
  G6_15 CDR-L1
RASEDISSAVA

SEQ ID NO: 446 - protein, 7 aa, Artificial
  G6_15 CDR-L2
SASFLYS

SEQ ID NO: 447 - protein, 9 aa, Artificial
  G6_15 CDR-L3
EEAYTSPPT

SEQ ID NO: 448 - protein, 214 aa, Artificial
  G6_15 LC
DIQMTQSPSSLSASVGDRVTITCRASEDISSAVAWYQQKPGKAPKLLIYSASFLYSGVPSRFSGSGSGTDFTLTISSLQPEDFATYYCEEAYTSPPTFGQGTKVEIKRTVAAPSVFIFPPSDEQLKSGTASVVCLLNNFYPREAKVQWKVDNALQSGNSQESVTEQDSKDSTYSLSSTLTLSKADYEKHKVYACEVTHQGLSSPVTKSFNRGEC

SEQ ID NO: 449 - protein, 11 aa, Artificial
  G6_62 CDR-L1
RASEEISSSVA

SEQ ID NO: 450 - protein, 7 aa, Artificial
  G6_62 CDR-L2
SASFLYS

SEQ ID NO: 451 - protein, 9 aa, Artificial
  G6_62 CDR-L3
EESFTTPPT

SEQ ID NO: 452 - protein, 214 aa, Artificial
  G6_62 LC
DIQMTQSPSSLSASVGDRVTITCRASEEISSSVAWYQQKPGKAPKLLIYSASFLYSGVPSRFSGSGSGTDFTLTISSLQPEDFATYYCEESFTTPPTFGQGTKVEIKRTVAAPSVFIFPPSDEQLKSGTASVVCLLNNFYPREAKVQWKVDNALQSGNSQESVTEQDSKDSTYSLSSTLTLSKADYEKHKVYACEVTHQGLSSPVTKSFNRGEC

SEQ ID NO: 453 - protein, 11 aa, Artificial
  G6_64 CDR-L1
RASQEVATAVA

SEQ ID NO: 454 - protein, 7 aa, Artificial
  G6_64 CDR-L2
SASFLYS

SEQ ID NO: 455 - protein, 9 aa, Artificial
  G6_64 CDR-L3
QQAFSSPAT

SEQ ID NO: 456 - protein, 214 aa, Artificial
  G6_64 LC
DIQMTQSPSSLSASVGDRVTITCRASQEVATAVAWYQQKPGKAPKLLIFSASFLYSGVPSRFSGSGSGTDFTLTISSLQPEDFATYYCQQAFSSPATFGQGTKVEIKRTVAAPSVFIFPPSDEQLKSGTASVVCLLNNFYPREAKVQWKVDNALQSGNSQESVTEQDSKDSTYSLSSTLTLSKADYEKHKVYACEVTHQGLSSPVTKSFNRGEC

SEQ ID NO: 457 - protein, 11 aa, Artificial
  G6_4 CDR-L1
RASEDVASAVA

SEQ ID NO: 458 - protein, 7 aa, Artificial
  G6_4 CDR-L2
AASYLYS

SEQ ID NO: 459 - protein, 9 aa, Artificial
  G6_4 CDR-L3
QESYSSPPT

SEQ ID NO: 460 - protein, 214 aa, Artificial
  G6_4 LC
DIQMTQSPSSLSASVGDRVTITCRASEDVASAVAWYQQKPGKAPKLLIYAASYLYSGVPSRFSGSGSGTDFTLTISSLQPEDFATYYCQESYSSPPTFGQGTKVEIKRTVAAPSVFIFPPSDEQLKSGTASVVCLLNNFYPREAKVQWKVDNALQSGNSQESVTEQDSKDSTYSLSSTLTLSKADYEKHKVYACEVTHQGLSSPVTKSFNRGEC

SEQ ID NO: 461 - protein, 11 aa, Artificial
  G6_25 CDR-L1
RASQDVSSSVA

SEQ ID NO: 462 - protein, 7 aa, Artificial
  G6_25 CDR-L2
AASYLYS

SEQ ID NO: 463 - protein, 9 aa, Artificial
  G6_25 CDR-L3
QEAFSSPAT

SEQ ID NO: 464 - protein, 214 aa, Artificial
  G6_25 LC
DIQMTQSPSSLSASVGDRVTITCRASQDVSSSVAWYQQKPGKAPKLLIYAASYLYSGVPSRFSGSGSGTDFTLTISSLQPEDFATYYCQEAFSSPATFGQGTKVEIKRTVAAPSVFIFPPSDEQLKSGTASVVCLLNNFYPREAKVQWKVDNALQSGNSQESVTEQDSKDSTYSLSSTLTLSKADYEKHKVYACEVTHQGLSSPVTKSFNRGEC

SEQ ID NO: 465 - protein, 11 aa, Artificial
  G6_86 CDR-L1
RASQDIATSVA

SEQ ID NO: 466 - protein, 7 aa, Artificial
  G6_86 CDR-L2
AASFLFS

SEQ ID NO: 467 - protein, 9 aa, Artificial
  G6_86 CDR-L3
QQSYTNPPT

SEQ ID NO: 468 - protein, 214 aa, Artificial
  G6_86 LC
DIQMTQSPSSLSASVGDRVTITCRASQDIATSVAWYQQKPGKAPKLLIYAASFLFSGVPSRFSGSGSGTDFTLTISSLQPEDFATYYCQQSYTNPPTFGQGTKVEIKRTVAAPSVFIFPPSDEQLKSGTASVVCLLNNFYPREAKVQWKVDNALQSGNSQESVTEQDSKDSTYSLSSTLTLSKADYEKHKVYACEVTHQGLSSPVTKSFNRGEC

SEQ ID NO: 469 - protein, 11 aa, Artificial
  G6_74 CDR-L1
RASEEVASSVA

SEQ ID NO: 470 - protein, 7 aa, Artificial
  G6_74 CDR-L2
SASYLYS

SEQ ID NO: 471 - protein, 9 aa, Artificial
  G6_74 CDR-L3
QKAYSTPPT

SEQ ID NO: 472 - protein, 214 aa, Artificial
  G6_74 LC
DIQMTQSPSSLSASVGDRVTITCRASEEVASSVAWYQQKPGKAPKLLIYSASYLYSGVPSRFSGSGSGTDFTLTISSLQPEDFATYYCQKAYSTPPTFGQGTKVEIKRTVAAPSVFIFPPSDEQLKSGTASVVCLLNNFYPREAKVQWKVDNALQSGNSQESVTEQDSKDSTYSLSSTLTLSKADYEKHKVYACEVTHQGLSSPVTKSFNRGEC

SEQ ID NO: 473 - protein, 10 aa, Artificial
  G6 CDR-H1
GFTISDYWIH

SEQ ID NO: 474 - protein, 17 aa, Artificial
  G6 CDR-H2
GITPAGGYTYYADSVKG

SEQ ID NO: 475 - protein, 11 aa, Artificial
  G6 CDR-H3
FVFFLPYAMDY

SEQ ID NO: 476 - protein, 227 aa, Artificial; identical to SEQ ID NO: 31
  G6 HC

SEQ ID NO: 477 - protein, 10 aa, Artificial
  G6_87 CDR-H1
GFTISDFWIH

SEQ ID NO: 478 - protein, 17 aa, Artificial
  G6_87 CDR-H2
GVTPAGGYSYYADSVKG

SEQ ID NO: 479 - protein, 11 aa, Artificial
  G6_87 CDR-H3
FVFFLPYAMDY

SEQ ID NO: 480 - protein, 227 aa, Artificial
  G6_87 HC
EVQLVESGGGLVQPGGSLRLSCAASGFTISDFWIHWVRQAPGKGLEWVAGVTPAGGYSYYADSVKGRFTISADTSKNTAYLQMNSLRAEDTAVYYCARFVFFLPYAMDYWGQGTLVTVSSASTKGPSVFPLAPSSKSTSGGTAALGCLVKDYFPEPVTVSWNSGALTSGVHTFPAVLQSSGLYSLSSVVTVPSSSLGTQTYICNVNHKPSNTKVDKKVEPKSCDKTH

SEQ ID NO: 481 - protein, 10 aa, Artificial
  G6_88 CDR-H1
GFTIAEYWIH

SEQ ID NO: 482 - protein, 17 aa, Artificial
  G6_88 CDR-H2
GVTPAGGYTFYADSVKG

SEQ ID NO: 483 - protein, 11 aa, Artificial
  G6_88 CDR-H3
FVFFLPYAMDY

SEQ ID NO: 484 - protein, 227 aa, Artificial
  G6_88 HC
EVQLVESGGGLVQPGGSLRLSCAASGFTIAEYWIHWVRQAPGKGLEWVAGVTPAGGYTFYADSVKGRFTISADTSKNTAYLQMNSLRAEDTAVYYCARFVFFLPYAMDYWGQGTLVTVSSASTKGPSVFPLAPSSKSTSGGTAALGCLVKDYFPEPVTVSWNSGALTSGVHTFPAVLQSSGLYSLSSVVTVPSSSLGTQTYICNVNHKPSNTKVDKKVEPKSCDKTH

SEQ ID NO: 485 - protein, 10 aa, Artificial
  G6_89 CDR-H1
GFTISDFWIH

SEQ ID NO: 486 - protein, 17 aa, Artificial
  G6_89 CDR-H2
GITAAGGFSYYADSVKG

SEQ ID NO: 487 - protein, 11 aa, Artificial
  G6_89 CDR-H3
FVFFLPYAMDY

SEQ ID NO: 488 - protein, 227 aa, Artificial
  G6_89 HC
EVQLVESGGGLVQPGGSLRLSCAASGFTISDFWIHWVRQAPGKGLEWVAGITAAGGFSYYADSVKGRFTISADTSKNTAYLQMNSLRAEDTAVYYCARFVFFLPYAMDYWGQGTLVTVSSASTKGPSVFPLAPSSKSTSGGTAALGCLVKDYFPEPVTVSWNSGALTSGVHTFPAVLQSSGLYSLSSVVTVPSSSLGTQTYICNVNHKPSNTKVDKKVEPKSCDKTH

SEQ ID NO: 489 - protein, 11 aa, Artificial
  YADS1 CDR-L1
RASQSYAYAVA

SEQ ID NO: 490 - protein, 7 aa, Artificial
  YADS1 CDR-L2
DASYLYS

SEQ ID NO: 491 - protein, 8 aa, Artificial
  YADS1 CDR-L3
QQSYYSPY

SEQ ID NO: 492 - protein, 213 aa, Artificial
  Light Chain Sequence
DIQMTQSPSSLSASVGDRVTITCRASQASYSSVAWYQQKPGKAPKLLIYAASYLYSGVPSRFSGSGSGTDFTLTISSLQPEDFATYYCQSSASPATFGQGTKVEIKRTVAAPSVFIFPPSDEQLKSGTASVVCLLNNFYPREAKVQWKVDNALQSGNSQESVTEQDSKDSTYSLSSTLTLSKADYEKHKVYACEVTHQGLSSPVTKSFNRGEC

SEQ ID NO: 493 - protein, 11 aa, Artificial
  YADS2 CDR-L1
RASQSYAYAVA

SEQ ID NO: 494 - protein, 7 aa, Artificial
  YADS2 CDR-L2
DASYLYS

SEQ ID NO: 495 - protein, 9 aa, Artificial
  YADS2 CDR-L3
QQAYSSPDT

SEQ ID NO: 496 - protein, 214 aa, Artificial; identical to SEQ ID NO: 21
  YADS2 LC

SEQ ID NO: 497 - protein, 11 aa, Artificial
  YADS3 CDR-L1
RASQASYYDVA

SEQ ID NO: 498 - protein, 7 aa, Artificial
  YADS3 CDR-L2
AASYLYS

SEQ ID NO: 499 - protein, 9 aa, Artificial
  YADS3 CDR-L3
QQYYYAPAT

SEQ ID NO: 500 - protein, 214 aa, Artificial; identical to SEQ ID NO: 23
  YADS3 LC

SEQ ID NO: 501 - protein, 10 aa, Artificial
  YADS1 CDR -H1
GFDIYDDDIH

SEQ ID NO: 502 - protein, 17 aa, Artificial
  YADS1 CDR-H2
YIAPSYGYTDYADSVKG

SEQ ID NO: 503 - protein, 13 aa, Artificial
  YADS1 CDR-H3
SSDASYSYSAMDY

SEQ ID NO: 504 - protein, 252 aa, Artificial; identical to SEQ ID NO: 358
  YADS1 HC

SEQ ID NO: 505 - protein, 10 aa, Artificial
  YADS2 CDR -H1
GFAISDYDIH

SEQ ID NO: 506 - protein, 17 aa, Artificial
  YADS2 CDR-H2
DIAPYAGATAYADSVKG

SEQ ID NO: 507 - protein, 11 aa, Artificial
  YADS2 CDR-H3
SSYAYYAAMDY

SEQ ID NO: 508 - protein, 250 aa, Artificial; identical to SEQ ID NO: 22
  YADS2 HC

SEQ ID NO: 509 - protein, 10 aa, Artificial
  YADS3 CDR -H1
GFSISDYDIH

SEQ ID NO: 510 - protein, 17 aa, Artificial
  YADS3 CDR-H2
AIAPYSGSTYYADSVKG

SEQ ID NO: 511 - protein, 11 aa, Artificial
  YADS3 CDR-H3
SSYAYYSAMDY

SEQ ID NO: 512 - protein, 250 aa, Artificial; identical to SEQ ID NO: 24
  YADS3 HC

SEQ ID NO: 513 - protein, 10 aa, Artificial
  YADS4 CDR-H1
GFDIYDYAIH

SEQ ID NO: 514 - protein, 17 aa, Artificial
  YADS4 CDR-H2
SIAPYAGSTYYADSVKG

SEQ ID NO: 515 - protein, 11 aa, Artificial
  YADS4 CDR-H3
DSYAYYAAMDY

SEQ ID NO: 516 - protein, 250 aa, Artificial; identical to SEQ ID NO: 308
  YADS4 HC

SEQ ID NO: 517 - protein, 10 aa, Artificial
  YADS5 CDR -H1
GFSIAYYDIH

SEQ ID NO: 518 - protein, 17 aa, Artificial
  YADS5 CDR-H2
SIAPYAGATDYADSVKG

SEQ ID NO: 519 - protein, 11 aa, Artificial
  YADS5 CDR-H3
SSYAYASAMDY

SEQ ID NO: 520 - protein, 250 aa, Artificial; identical to SEQ ID NO: 304
  YADS5 HC

SEQ ID NO: 521 - protein, 10 aa, Artificial
  YADS6 CDR -H1
GFAIAYDDIH

SEQ ID NO: 522 - protein, 17 aa, Artificial
  YADS6 CDR-H2
SIAPYAGATAYADSVKG

SEQ ID NO: 523 - protein, 11 aa, Artificial
  YADS6 CDR-H3
AAAYAAYAMDY

SEQ ID NO: 524 - protein, 250 aa, Artificial; identical to SEQ ID NO: 324
  YADS6 HC

SEQ ID NO: 525 - protein, 10 aa, Artificial
  YADS7 CDR -H1
GFAIDYYDIH

SEQ ID NO: 526 - protein, 17 aa, Artificial
  YADS7 CDR-H2
SIAPYAGSTYYADSVKG

SEQ ID NO: 527 - protein, 11 aa, Artificial
  YADS7 CDR-H3
SAAYYAYAMDY

SEQ ID NO: 528 - protein, 250 aa, Artificial; identical to SEQ ID NO: 320
  YADS7 HC

SEQ ID NO: 529 - protein, 10 aa, Artificial
  YADS8 CDR -H1
GFAIAAYDIH

SEQ ID NO: 530 - protein, 17 aa, Artificial
  YADS8 CDR-H2
SISPYAGATSYADSVKG

SEQ ID NO: 531 - protein, 11 aa, Artificial
  YADS8 CDR-H3
AAAYYYDAMDY

SEQ ID NO: 532 - protein, 250 aa, Artificial; identical to SEQ ID NO: 328
  YADS8 HC

SEQ ID NO: 533 - protein, 10 aa, Artificial
  YADS9 CDR -H1
GFDISAYAIH

SEQ ID NO: 534 - protein, 17 aa, Artificial
  YADS9 CDR-H2
YISPSSGATAYADSVKG

SEQ ID NO: 535 - protein, 11 aa, Artificial
  YADS9 CDR-H3
SAYYSYAAMDY

SEQ ID NO: 536 - protein, 250 aa, Artificial; identical to SEQ ID NO: 350
  YADS9 HC

SEQ ID NO: 537 - protein, 10 aa, Artificial
  YADS10 CDR -H1
GFDIYDYSIH

SEQ ID NO: 538 - protein, 17 aa, Artificial
  YADS10 CDR-H2
YISPYSGATAYADSVKG

SEQ ID NO: 539 - protein, 11 aa, Artificial
  YADS10 CDR-H3
SSYAYYDAMDY

SEQ ID NO: 540 - protein, 250 aa, Artificial; identical to SEQ ID NO: 340
  YADS10 HC

SEQ ID NO: 541 - protein, 10 aa, Artificial
  YADS11 CDR -H1
GFDISASDIH

SEQ ID NO: 542 - protein, 17 aa, Artificial
  YADS11 CDR-H2
SISPYAGYTAYADSVKG

SEQ ID NO: 543 - protein, 11 aa, Artificial
  YADS11 CDR-H3
SAYYAASAMDY

SEQ ID NO: 544 - protein, 250 aa, Artificial; identical to SEQ ID NO: 312
  YADS11 HC

SEQ ID NO: 545 - protein, 10 aa, Artificial
  YADS12 CDR -H1
GFDIAYYDIH

SEQ ID NO: 546 - protein, 17 aa, Artificial
  YADS12 CDR-H2
SIAPYAGSTAYADSVKG

SEQ ID NO: 547 - protein, 11 aa, Artificial
  YADS12 CDR-H3
AAAAYAYAMDY

SEQ ID NO: 548 - protein, 250 aa, Artificial; identical to SEQ ID NO: 316
  YADS12 HC

SEQ ID NO: 549 - protein, 10 aa, Artificial
  YADS13 CDR -H1
GFSIDYYAIH

SEQ ID NO: 550 - protein, 17 aa, Artificial
  YADS13 CDR-H2
SIAPYAGYTYYADSVKG

SEQ ID NO: 551 - protein, 11 aa, Artificial
  YADS13 CDR-H3
AAAYYYDAMDY

SEQ ID NO: 552 - protein, 250 aa, Artificial; identical to SEQ ID NO: 300
  YADS13 HC

SEQ ID NO: 553 - protein, 10 aa, Artificial
  YADS14 CDR -H1
GFDISYYDIH

SEQ ID NO: 554 - protein, 17 aa, Artificial
  YADS14 CDR-H2
SIAPYAGATYYADSVKG

SEQ ID NO: 555 - protein, 11 aa, Artificial
  YADS14 CDR-H3
AADYAYDAMDY

SEQ ID NO: 556 - protein, 250 aa, Artificial; identical to SEQ ID NO: 276
  YADS14 HC

SEQ ID NO: 557 - protein, 10 aa, Artificial
  YADS15 CDR -H1
GFAIAAYAIH

SEQ ID NO: 558 - protein, 17 aa, Artificial
  YADS15 CDR-H2
DIYPAAGDTAYADSVKG

SEQ ID NO: 559 - protein, 13 aa, Artificial
  YADS15 CDR-H3
SYYYSYSSYAMDY

SEQ ID NO: 560 - protein, 252 aa, Artificial; identical to SEQ ID NO: 344
  YADS15 HC

SEQ ID NO: 561 - protein, 9 aa, Artificial
  YS1 Light chain CDR3
QQSYYSPYT

SEQ ID NO: 562 - protein, 9 aa, Artificial
  YS1 Heavy Chain CDR1
GFSISSSSI

SEQ ID NO: 563 - protein, 17 aa, Artificial
  YS1 Heavy chain CDR2
YISPSSGSTSYADSVKG

SEQ ID NO: 564 - protein, 12 aa, Artificial
  YS1 Heavy chain CDR3
YYSSSYYYSYYY

SEQ ID NO: 565 - protein, 214 aa, Artificial; identical to SEQ ID NO: 42
  YS2 Fab light chain

SEQ ID NO: 566 - protein, 8 aa, Artificial
  YS2 Heavy chain CDR1
GFSYYSSI

SEQ ID NO: 567 - protein, 12 aa, Artificial
  YS2 Heavy Chain CDR3
YYSSSSYYSYYY

SEQ ID NO: 568 - protein, 232 aa, Artificial
  YS2 Fab heavy chain
EVQLVESGGGLVQPGGSLRLSCAASGFSYYSSSIHWVRQAPGKGLEWVAYISPSSGSTSYADSVKGRFTISADTSKNTAYLQMNSLRAEDTAVYYCSRYYSSSSYYSYYYAMDYWGQGTLVTVSSASTKGPSVFPLAPSSKSTSGGTAALGCLVKDYFPEPVTVSWNSGALTSGVHTFPAVLQSSGLYSLSSVVTVPSSSLGTQTYICNVNHKPSNTKVDKKVEPKSCDKTH

SEQ ID NO: 569 - protein, 9 aa, Artificial
  YS3 CDR3 light chain
QQSYYSPYT

SEQ ID NO: 570 - protein, 214 aa, Artificial; identical to SEQ ID NO: 19
  YS3 Fab light chain

SEQ ID NO: 571 - protein, 9 aa, Artificial
  YS3 CDR1 heavy chain
GFSSYSSSI

SEQ ID NO: 572 - protein, 16 aa, Artificial
  YS3 CDR2 heavy chain
YYSSSYSSSSSADSVK

SEQ ID NO: 573 - protein, 15 aa, Artificial
  CDR-H3
YSSYSSSSYYSSYYY

SEQ ID NO: 574 - protein, 234 aa, Artificial
  YS3 Fab heavy chain
EVQLVESGGGLVQPGGSLRLSCAASGFSSYSSSIHWVRQAPGKGLEWVAYYSSSYSSSSADSVKGRFTISADTSKNTAYLQMNSLRAEDTAVYYCSRYSSYSSSSYYSSYYYAMDYWGQGTLVTVSSASTKGPSVFPLAPSSKSTSGGTAALGCLVKDYFPEPVTVSWNSGALTSGVHTFPAVLQSSGLYSLSSVVTVPSSSLGTQTYICNVNHKPSNTKVDKKVEPKSCDKTH

SEQ ID NO: 575 - protein, 15 aa, Artificial
  YS4 CDR3 heavy chain
YYYSYYSSSYSSYYY

SEQ ID NO: 576 - protein, 235 aa, Artificial
  YS4 Fab heavy chain
EVQLVESGGGLVQPGGSLRLSCAASGFSSSSSSIHWVRQAPGKGLEWVAYYSSYSSSSSSADSVKGRFTISADTSKNTAYLQMNSLRAEDTAVYYCSRYYYSYYSSSYSSYYYAMDYWGQGTLVTVSSASTKGPSVFPLAPSSKSTSGGTAALGCLVKDYFPEPVTVSWNSGALTSGVHTFPAVLQSSGLYSLSSVVTVPSSSLGTQTYICNVNHKPSNTKVDKKVEPKSCDKTH

SEQ ID NO: 577 - protein, 9 aa, Artificial
  YS5 CDR3 light chain
QQSSYYPST

SEQ ID NO: 578 - protein, 214 aa, Artificial
  YS5 Fab light chain
DIQMTQSPSSLSASVGDRVTITCRASQSYAYAVAWYQQKPGKAPKLLIYDASYLYSGVPSRFSGSGSGTDFTLTISSLQPEDFATYYCQQSSYYPSTFGQGTKVEIKRTVAAPSVFIFPPSDEQLKSGTASVVCLLNNFYPREAKVQWKVDNALQSGNSQESVTEQDSKDSTYSLSSTLTLSKADYEKHKVYACEVTHQGLSSPVTKSFNRGEC

SEQ ID NO: 579 - protein, 15 aa, Artificial
  YS5 CDR3 heavy chain
YSSYSSSYSSYSYYY

SEQ ID NO: 580 - protein, 235 aa, Artificial
  YS5 Fab heavy chain
EVQLVESGGGLVQPGGSLRLSCAASGFSSSSSSIHWVRQAPGKGLEWVAYYSSSYSSSSSADSVKGRFTISADTSKNTAYLQMNSLRAEDTAVYYCSRYSSYSSSYSSYSYYYAMDYWGQGTLVTVSSASTKGPSVFPLAPSSKSTSGGTAALGCLVKDYFPEPVTVSWNSGALTSGVHTFPAVLQSSGLYSLSSVVTVPSSSLGTQTYICNVNHKPSNTKVDKKVEPKSCDKTH

SEQ ID NO: 581 - protein, 15 aa, Artificial
  YS6 CDR3 heavy chain
YSSYSSYSSSYSYYY

SEQ ID NO: 582 - protein, 235 aa, Artificial
  YS6 Fab heavy chain
EVQLVESGGGLVQPGGSLRLSCAASGFSISYSSIHWVRQAPGKGLEWVAYISPSSGSTSYADSVKGRFTISADTSKNTAYLQMNSLRAEDTAVYYCSRYSSYSSYSSSYSYYYAMDYWGQGTLVTVSSASTKGPSVFPLAPSSKSTSGGTAALGCLVKDYFPEPVTVSWNSGALTSGVHTFPAVLQSSGLYSLSSVVTVPSSSLGTQTYICNVNHKPSNTKVDKKVEPKSCDKTH

SEQ ID NO: 583 - protein, 9 aa, Artificial
  YS6 CDR3 light chain
QQSYYSPYT

SEQ ID NO: 584 - protein, 214 aa, Artificial; identical to SEQ ID NO: 19
  YS6 Fab light chain

SEQ ID NO: 585 - protein, 17 aa, Artificial
  YS7 CDR2 heavy chain
YISPYSGYTSYADSVKG

SEQ ID NO: 586 - protein, 9 aa, Artificial
  YS7 CDR3 light chain
QQSSYSPYT

SEQ ID NO: 587 - protein, 214 aa, Artificial; identical to SEQ ID NO: 42
  YS7 Fab light chain

SEQ ID NO: 588 - protein, 15 aa, Artificial
  YS7 CDR3 heavy chain
YSYSYSSSSSSSYYY

SEQ ID NO: 589 - protein, 235 aa, Artificial
  YS7 Fab heavy chain
EVQLVESGGGLVQPGGSLRLSCAASGFSISSSSIHWVRQAPGKGLEWVAYISPYSGYTSYADSVKGRFTISADTSKNTAYLQMNSLRAEDTAVYYCSRYSYSYSSSSSSSYYYAMDYWGQGTLVTVSSASTKGPSVFPLAPSSKSTSGGTAALGCLVKDYFPEPVTVSWNSGALTSGVHTFPAVLQSSGLYSLSSVVTVPSSSLGTQTYICNVNHKPSNTKVDKKVEPKSCDKTH

SEQ ID NO: 590 - protein, 17 aa, Artificial
  YS8 CDR2 heavy chain
YISPSSGYTSYADSVKG

SEQ ID NO: 591 - protein, 15 aa, Artificial
  YS8 CDR3 heavy chain
YYSSYSSYSSYSYYY

SEQ ID NO: 592 - protein, 235 aa, Artificial
  YS8 Fab heavy chain
EVQLVESGGGLVQPGGSLRLSCAASGFSISSSSIHWVRQAPGKGLEWVAYISPSSGYTSYADSVKGRFTISADTSKNTAYLQMNSLRAEDTAVYYCSRYYSSYSSYSSYSYYYAMDYWGQGTLVTVSSASTKGPSVFPLAPSSKSTSGGTAALGCLVKDYFPEPVTVSWNSGALTSGVHTFPAVLQSSGLYSLSSVVTVPSSSLGTQTYICNVNHKPSNTKVDKKVEPKSCDKTH

SEQ ID NO: 593 - protein, 14 aa, Artificial
  YS9  CDR3 heavy chain
YYSSYSYYSSSYYY

SEQ ID NO: 594 - protein, 234 aa, Artificial
  YS9 Fab heavy chain
EVQLVESGGGLVQPGGSLRLSCAASGFSISYSSIHWVRQAPGKGLEWVAYISPYSGSTSYADSVKGRFTISADTSKNTAYLQMNSLRAEDTAVYYCSRYYSSYSYYSSSYYYAMDYWGQGTLVTVSSASTKGPSVFPLAPSSKSTSGGTAALGCLVKDYFPEPVTVSWNSGALTSGVHTFPAVLQSSGLYSLSSVVTVPSSSLGTQTYICNVNHKPSNTKVDKKVEPKSCDKTH

SEQ ID NO: 595 - protein, 9 aa, Artificial
  YS10 CDR-H3
QQSYSSPYI

SEQ ID NO: 596 - protein, 14 aa, Artificial
  YS10 CDR3 heavy chain
YSSYSYSSSYSYYY

SEQ ID NO: 597 - protein, 234 aa, Artificial
  YS10 Fab heavy chain
EVQLVESGGGLVQPGGSLRLSCAASGFSISSSSIHWVRQAPGKGLEWVAYISPSSGSTSYADSVKGRFTISADTSKNTAYLQMNSLRAEDTAVYYCSRYSSYSYSSSYSYYYAMDYWGQGTLVTVSSASTKGPSVFPLAPSSKSTSGGTAALGCLVKDYFPEPVTVSWNSGALTSGVHTFPAVLQSSGLYSLSSVVTVPSSSLGTQTYICNVNHKPSNTKVDKKVEPKSCDKTH

SEQ ID NO: 598 - protein, 214 aa, Artificial
  YS10 Fab light chain
DIQMTQSPSSLSASVGDRVTITCRASQSYAYAVAWYQQKPGKAPKLLIYDASYLYSGVPSRFSGSGSGTDFTLTISSLQPEDFATYYCQQSYSSPYTFGQGTKVEIKRTVAAPSVFIFPPSDEQLKSGTASVVCLLNNFYPREAKVQWKVDNALQSGNSQESVTEQDSKDSTYSLSSTLTLSKADYEKHKVYACEVTHQGLSSPVTKSFNRGEC

SEQ ID NO: 599 - protein, 14 aa, Artificial
  YS11 CDR3 heavy chain
YSSSSYSSYSSYYY

SEQ ID NO: 600 - protein, 234 aa, Artificial
  YS11 Fab heavy chain
EVQLVESGGGLVQPGGSLRLSCAASGFSISSSSIHWVRQAPGKGLEWVAYISPSSGYTSYADSVKGRFTISADTSKNTAYLQMNSLRAEDTAVYYCSRYSSSSYSSYSSYYYAMDYWGQGTLVTVSSASTKGPSVFPLAPSSKSTSGGTAALGCLVKDYFPEPVTVSWNSGALTSGVHTFPAVLQSSGLYSLSSVVTVPSSSLGTQTYICNVNHKPSNTKVDKKVEPKSCDKTH

SEQ ID NO: 601 - protein, 9 aa, Artificial
  YS12 CDR1 heavy chain
GFYISSSSI

SEQ ID NO: 602 - protein, 14 aa, Artificial
  YS12 CDR3 heavy chain
YSSSSSYYSSSYYY

SEQ ID NO: 603 - protein, 234 aa, Artificial
  YS12 Fab heavy chain
EVQLVESGGGLVQPGGSLRLSCAASGFYISSSSIHWVRQAPGKGLEWVAYISPSSGSTSYADSVKGRFTISADTSKNTAYLQMNSLRAEDTAVYYCSRYSSSSSYYSSSYYYAMDYWGQGTLVTVSSASTKGPSVFPLAPSSKSTSGGTAALGCLVKDYFPEPVTVSWNSGALTSGVHTFPAVLQSSGLYSLSSVVTVPSSSLGTQTYICNVNHKPSNTKVDKKVEPKSCDKTH

SEQ ID NO: 604 - protein, 14 aa, Artificial
  YS13 CDR3 heavy chain
YSYSSSSYYYSYYY

SEQ ID NO: 605 - protein, 234 aa, Artificial
  YS13 Fab heavy chain
EVQLVESGGGLVQPGGSLRLSCAASGFSISSSSIHWVRQAPGKGLEWVAYISPSSGSTSYADSVKGRFTISADTSKNTAYLQMNSLRAEDTAVYYCSRYSYSSSSYYYSYYYAMDYWGQGTLVTVSSASTKGPSVFPLAPSSKSTSGGTAALGCLVKDYFPEPVTVSWNSGALTSGVHTFPAVLQSSGLYSLSSVVTVPSSSLGTQTYICNVNHKPSNTKVDKKVEPKSCDKTH

SEQ ID NO: 606 - protein, 14 aa, Artificial
  YS14 CDR3 heavy chain
YSSSSYSSYYSYYY

SEQ ID NO: 607 - protein, 234 aa, Artificial
  YS14 Fab heavy chain
EVQLVESGGGLVQPGGSLRLSCAASGFSISSSSIHWVRQAPGKGLEWVAYISPYSGSTSYADSVKGRFTISADTSKNTAYLQMNSLRAEDTAVYYCSRYSSSSYSSYYSYYYAMDYWGQGTLVTVSSASTKGPSVFPLAPSSKSTSGGTAALGCLVKDYFPEPVTVSWNSGALTSGVHTFPAVLQSSGLYSLSSVVTVPSSSLGTQTYICNVNHKPSNTKVDKKVEPKSCDKTH

SEQ ID NO: 608 - protein, 9 aa, Artificial
  YS15 CDR3 light chain
QQSYSYPST

SEQ ID NO: 609 - protein, 214 aa, Artificial
  YS15 Fab light chain
DIQMTQSPSSLSASVGDRVTITCRASQSYAYAVAWYQQKPGKAPKLLIYDASYLYSGVPSRFSGSGSGTDFTLTISSLQPEDFATYYCQQSYSYPSTFGQGTKVEIKRTVAAPSVFIFPPSDEQLKSGTASVVCLLNNFYPREAKVQWKVDNALQSGNSQESVTEQDSKDSTYSLSSTLTLSKADYEKHKVYACEVTHQGLSSPVTKSFNRGEC

SEQ ID NO: 610 - protein, 17 aa, Artificial
  YS15 CDR2 heavy chain
YISPYSGSTYYADSVKG

SEQ ID NO: 611 - protein, 14 aa, Artificial
  YS15 CDR3 heavy chain
YSSYSYSSSYSYYY

SEQ ID NO: 612 - protein, 234 aa, Artificial
  YS15 Fab heavy chain
EVQLVESGGGLVQPGGSLRLSCAASGFSISSSSIHWVRQAPGKGLEWVAYISPYSGSTYYADSVKGRFTISADTSKNTAYLQMNSLRAEDTAVYYCSRYSSYSYSSSYSYYYAMDYWGQGTLVTVSSASTKGPSVFPLAPSSKSTSGGTAALGCLVKDYFPEPVTVSWNSGALTSGVHTFPAVLQSSGLYSLSSVVTVPSSSLGTQTYICNVNHKPSNTKVDKKVEPKSCDKTH

SEQ ID NO: 613 - protein, 14 aa, Artificial
  YS16 CDR3 heavy chain
YSYYSYSSYSSYYY

SEQ ID NO: 614 - protein, 234 aa, Artificial
  YS16 Fab heavy chain
EVQLVESGGGLVQPGGSLRLSCAASGFSISSSSIHWVRQAPGKGLEWVAYISPYSGSTYYADSVKGRFTISADTSKNTAYLQMNSLRAEDTAVYYCSRYSYYSYSSYSSYYYAMDYWGQGTLVTVSSASTKGPSVFPLAPSSKSTSGGTAALGCLVKDYFPEPVTVSWNSGALTSGVHTFPAVLQSSGLYSLSSVVTVPSSSLGTQTYICNVNHKPSNTKVDKKVEPKSCDKTH

SEQ ID NO: 615 - protein, 9 aa, Artificial
  YS17 CDR3 light chain
QQSYYYPST

SEQ ID NO: 616 - protein, 214 aa, Artificial
  YS17 Fab light chain
DIQMTQSPSSLSASVGDRVTITCRASQSYAYAVAWYQQKPGKAPKLLIYDASYLYSGVPSRFSGSGSGTDFTLTISSLQPEDFATYYCQQSYYYPSTFGQGTKVEIKRTVAAPSVFIFPPSDEQLKSGTASVVCLLNNFYPREAKVQWKVDNALQSGNSQESVTEQDSKDSTYSLSSTLTLSKADYEKHKVYACEVTHQGLSSPVTKSFNRGEC

SEQ ID NO: 617 - protein, 17 aa, Artificial
  YS17 CDR2 heavy chain
SISPYYGYTSYADSVKG

SEQ ID NO: 618 - protein, 14 aa, Artificial
  YS17 CDR3 heavy chain
YSSYSSYSSYSYYY

SEQ ID NO: 619 - protein, 234 aa, Artificial
  YS17 Fab heavy chain
EVQLVESGGGLVQPGGSLRLSCAASGFSISSSSIHWVRQAPGKGLEWVASISPYYGYTSYADSVKGRFTISADTSKNTAYLQMNSLRAEDTAVYYCSRYSSYSSYSSYSYYYAMDYWGQGTLVTVSSASTKGPSVFPLAPSSKSTSGGTAALGCLVKDYFPEPVTVSWNSGALTSGVHTFPAVLQSSGLYSLSSVVTVPSSSLGTQTYICNVNHKPSNTKVDKKVEPKSCDKTH

SEQ ID NO: 620 - protein, 9 aa, Artificial
  YS18 CDR1 heavy chain
GFSIYSSSI

SEQ ID NO: 621 - protein, 14 aa, Artificial
  YS18 CDR3 heavy chain
YSYSSSSSYSSYYY

SEQ ID NO: 622 - protein, 234 aa, Artificial
  YS18 Fab heavy chain
EVQLVESGGGLVQPGGSLRLSCAASGFSIYSSSIHWVRQAPGKGLEWVAYISPYSGSTSYADSVKGRFTISADTSKNTAYLQMNSLRAEDTAVYYCSRYSYSSSSSYSSYYYAMDYWGQGTLVTVSSASTKGPSVFPLAPSSKSTSGGTAALGCLVKDYFPEPVTVSWNSGALTSGVHTFPAVLQSSGLYSLSSVVTVPSSSLGTQTYICNVNHKPSNTKVDKKVEPKSCDKTH

SEQ ID NO: 623 - protein, 14 aa, Artificial
  YS19 CDR3 heavy chain
YSSSYYSSYSSYYY

SEQ ID NO: 624 - protein, 234 aa, Artificial
  YS19 Fab heavy chain
EVQLVESGGGLVQPGGSLRLSCAASGFSISSSSIHWVRQAPGKGLEWVAYISPYSGYTSYADSVKGRFTISADTSKNTAYLQMNSLRAEDTAVYYCSRYSSSYYSSYSSYYYAMDYWGQGTLVTVSSASTKGPSVFPLAPSSKSTSGGTAALGCLVKDYFPEPVTVSWNSGALTSGVHTFPAVLQSSGLYSLSSVVTVPSSSLGTQTYICNVNHKPSNTKVDKKVEPKSCDKTH

SEQ ID NO: 625 - protein, 14 aa, Artificial
  YS20 CDR3 heavy chain
YSYSSSSSYSSYYY

SEQ ID NO: 626 - protein, 234 aa, Artificial
  YS20 Fab heavy chain
EVQLVESGGGLVQPGGSLRLSCAASGFSISSSSIHWVRQAPGKGLEWVAYISPYSGSTSYADSVKGRFTISADTSKNTAYLQMNSLRAEDTAVYYCSRYSYSSSSSYSSYYYAMDYWGQGTLVTVSSASTKGPSVFPLAPSSKSTSGGTAALGCLVKDYFPEPVTVSWNSGALTSGVHTFPAVLQSSGLYSLSSVVTVPSSSLGTQTYICNVNHKPSNTKVDKKVEPKSCDKTH

SEQ ID NO: 627 - protein, 17 aa, Artificial
  YS21 CDR2 heavy chain
YISPSSGSTSYADSVKG

SEQ ID NO: 628 - protein, 14 aa, Artificial
  YS21 CDR3 heavy chain
YSYYSYSSYYSYYY

SEQ ID NO: 629 - protein, 234 aa, Artificial
  YS21 Fab heavy chain
EVQLVESGGGLVQPGGSLRLSCAASGFYISSSSIHWVRQAPGKGLEWVAYISPSSGSTSYADSVKGRFTISADTSKNTAYLQMNSLRAEDTAVYYCSRYSYYSYSSYYSYYYAMDYWGQGTLVTVSSASTKGPSVFPLAPSSKSTSGGTAALGCLVKDYFPEPVTVSWNSGALTSGVHTFPAVLQSSGLYSLSSVVTVPSSSLGTQTYICNVNHKPSNTKVDKKVEPKSCDKTH

SEQ ID NO: 630 - protein, 9 aa, Artificial
  YS22 CDR3 light chain
QQSSSSPYT

SEQ ID NO: 631 - protein, 214 aa, Artificial
  YS22 Fab light chain
DIQMTQSPSSLSASVGDRVTITCRASQSYAYAVAWYQQKPGKAPKLLIYDASYLYSGVPSRFSGSGSGTDFTLTISSLQPEDFATYYCQQSSSSPYTFGQGTKVEIKRTVAAPSVFIFPPSDEQLKSGTASVVCLLNNFYPREAKVQWKVDNALQSGNSQESVTEQDSKDSTYSLSSTLTLSKADYEKHKVYACEVTHQGLSSPVTKSFNRGEC

SEQ ID NO: 632 - protein, 14 aa, Artificial
  YS22 CDR3 heavy chain
YYSSSYSYSSSYYY

SEQ ID NO: 633 - protein, 234 aa, Artificial
  YS22 Fab heavy chain
EVQLVESGGGLVQPGGSLRLSCAASGFSIYSSSIHWVRQAPGKGLEWVAYISPYSGYTSYADSVKGRFTISADTSKNTAYLQMNSLRAEDTAVYYCSRYYSSSYSYSSSYYYAMDYWGQGTLVTVSSASTKGPSVFPLAPSSKSTSGGTAALGCLVKDYFPEPVTVSWNSGALTSGVHTFPAVLQSSGLYSLSSVVTVPSSSLGTQTYICNVNHKPSNTKVDKKVEPKSCDKTH

SEQ ID NO: 634 - protein, 14 aa, Artificial
  YS23 CDR3 heavy chain
YYYSYYSSSYSYYY

SEQ ID NO: 635 - protein, 234 aa, Artificial
  YS23 Fab heavy chain
EVQLVESGGGLVQPGGSLRLSCAASGFSISSSSIHWVRQAPGKGLEWVAYISPYSGYTSYADSVKGRFTISADTSKNTAYLQMNSLRAEDTAVYYCSRYYYSYYSSSYSYYYAMDYWGQGTLVTVSSASTKGPSVFPLAPSSKSTSGGTAALGCLVKDYFPEPVTVSWNSGALTSGVHTFPAVLQSSGLYSLSSVVTVPSSSLGTQTYICNVNHKPSNTKVDKKVEPKSCDKTH

SEQ ID NO: 636 - protein, 14 aa, Artificial
  YS24 CDR3 heavy chain
YYSYSSYSSSSYYY

SEQ ID NO: 637 - protein, 234 aa, Artificial
  YS24 Fab heavy chain
EVQLVESGGGLVQPGGSLRLSCAASGFSISSSSIHWVRQAPGKGLEWVAYISPSSGSTSYADSVKGRFTISADTSKNTAYLQMNSLRAEDTAVYYCSRYYSYSSYSSSSYYYAMDYWGQGTLVTVSSASTKGPSVFPLAPSSKSTSGGTAALGCLVKDYFPEPVTVSWNSGALTSGVHTFPAVLQSSGLYSLSSVVTVPSSSLGTQTYICNVNHKPSNTKVDKKVEPKSCDKTH

SEQ ID NO: 638 - protein, 14 aa, Artificial
  YS25 CDR3 heavy chain
YYSSSYSSYSSYYY

SEQ ID NO: 639 - protein, 234 aa, Artificial
  YS25 Fab heavy chain
EVQLVESGGGLVQPGGSLRLSCAASGFSIYYSSIHWVRQAPGKGLEWVAYISPSSGSTSYADSVKGRFTISADTSKNTAYLQMNSLRAEDTAVYYCSRYYSSSYSSYSSYYYAMDYWGQGTLVTVSSASTKGPSVFPLAPSSKSTSGGTAALGCLVKDYFPEPVTVSWNSGALTSGVHTFPAVLQSSGLYSLSSVVTVPSSSLGTQTYICNVNHKPSNTKVDKKVEPKSCDKTH

SEQ ID NO: 640 - protein, 13 aa, Artificial
  YS26 CDR3 heavy chain
YSYSSSSSYSYYY

SEQ ID NO: 641 - protein, 233 aa, Artificial
  YS26 Fab heavy chain
EVQLVESGGGLVQPGGSLRLSCAASGFSISSSSIHWVRQAPGKGLEWVAYISPYSGSTSYADSVKGRFTISADTSKNTAYLQMNSLRAEDTAVYYCSRYSYSSSSSYSYYYAMDYWGQGTLVTVSSASTKGPSVFPLAPSSKSTSGGTAALGCLVKDYFPEPVTVSWNSGALTSGVHTFPAVLQSSGLYSLSSVVTVPSSSLGTQTYICNVNHKPSNTKVDKKVEPKSCDKTH

SEQ ID NO: 642 - protein, 17 aa, Artificial
  YS27 CDR2 heavy chain
SISPYSGYTSYADSVKG

SEQ ID NO: 643 - protein, 13 aa, Artificial
  YS27 CDR3 heavy chain
YSSSSYSYSSYYY

SEQ ID NO: 644 - protein, 233 aa, Artificial
  YS27 Fab heavy chain
EVQLVESGGGLVQPGGSLRLSCAASGFSIYYSSIHWVRQAPGKGLEWVASISPYSGYTSYADSVKGRFTISADTSKNTAYLQMNSLRAEDTAVYYCSRYSSSSYSYSSYYYAMDYWGQGTLVTVSSASTKGPSVFPLAPSSKSTSGGTAALGCLVKDYFPEPVTVSWNSGALTSGVHTFPAVLQSSGLYSLSSVVTVPSSSLGTQTYICNVNHKPSNTKVDKKVEPKSCDKTH

SEQ ID NO: 645 - protein, 17 aa, Artificial
  YS28 CDR2 heavy chain
YISPSYGSTSYADSVKG

SEQ ID NO: 646 - protein, 13 aa, Artificial
  YS28 CDR3 heavy chain
YYSSSYSYYSYYY

SEQ ID NO: 647 - protein, 233 aa, Artificial
  YS28 Fab heavy chain
EVQLVESGGGLVQPGGSLRLSCAASGFSISSSSIHWVRQAPGKGLEWVAYISPSYGSTSYADSVKGRFTISADTSKNTAYLQMNSLRAEDTAVYYCSRYYSSSYSYYSYYYAMDYWGQGTLVTVSSASTKGPSVFPLAPSSKSTSGGTAALGCLVKDYFPEPVTVSWNSGALTSGVHTFPAVLQSSGLYSLSSVVTVPSSSLGTQTYICNVNHKPSNTKVDKKVEPKSCDKTH

SEQ ID NO: 648 - protein, 13 aa, Artificial
  YS29 CDR3 heavy chain
YSSSSSSYYSYYY

SEQ ID NO: 649 - protein, 233 aa, Artificial
  YS29 Fab heavy chain
EVQLVESGGGLVQPGGSLRLSCAASGFSISSSSIHWVRQAPGKGLEWVAYISPYSGYTSYADSVKGRFTISADTSKNTAYLQMNSLRAEDTAVYYCSRYSSSSSSYYSYYYAMDYWGQGTLVTVSSASTKGPSVFPLAPSSKSTSGGTAALGCLVKDYFPEPVTVSWNSGALTSGVHTFPAVLQSSGLYSLSSVVTVPSSSLGTQTYICNVNHKPSNTKVDKKVEPKSCDKTH

SEQ ID NO: 650 - protein, 13 aa, Artificial
  YS30 CDR3 heavy chain
YSSSYYSSYSYYY

SEQ ID NO: 651 - protein, 233 aa, Artificial
  YS30 Fab heavy chain
EVQLVESGGGLVQPGGSLRLSCAASGFSISSSSIHWVRQAPGKGLEWVAYISPSSGSTSYADSVKGRFTISADTSKNTAYLQMNSLRAEDTAVYYCSRYSSSYYSSYSYYYAMDYWGQGTLVTVSSASTKGPSVFPLAPSSKSTSGGTAALGCLVKDYFPEPVTVSWNSGALTSGVHTFPAVLQSSGLYSLSSVVTVPSSSLGTQTYICNVNHKPSNTKVDKKVEPKSCDKTH

SEQ ID NO: 652 - protein, 13 aa, Artificial
  YS31 CDR3 heavy chain
YSSSSYSYSSYYY

SEQ ID NO: 653 - protein, 233 aa, Artificial
  YS31 Fab heavy chain
EVQLVESGGGLVQPGGSLRLSCAASGFSIYSSSIHWVRQAPGKGLEWVAYISPSSGSTSYADSVKGRFTISADTSKNTAYLQMNSLRAEDTAVYYCSRYSSSSYSYSSYYYAMDYWGQGTLVTVSSASTKGPSVFPLAPSSKSTSGGTAALGCLVKDYFPEPVTVSWNSGALTSGVHTFPAVLQSSGLYSLSSVVTVPSSSLGTQTYICNVNHKPSNTKVDKKVEPKSCDKTH

SEQ ID NO: 654 - protein, 13 aa, Artificial
  YS32 CDR3 heavy chain
YYSSSSSYYSYYY

SEQ ID NO: 655 - protein, 233 aa, Artificial
  YS32 Fab heavy chain
EVQLVESGGGLVQPGGSLRLSCAASGFSIYSSSIHWVRQAPGKGLEWVAYISPSSGSTSYADSVKGRFTISADTSKNTAYLQMNSLRAEDTAVYYCSRYYSSSSSYYSYYYAMDYWGQGTLVTVSSASTKGPSVFPLAPSSKSTSGGTAALGCLVKDYFPEPVTVSWNSGALTSGVHTFPAVLQSSGLYSLSSVVTVPSSSLGTQTYICNVNHKPSNTKVDKKVEPKSCDKTH

SEQ ID NO: 656 - protein, 13 aa, Artificial
  YS33 CDR3 heavy chain
YSSYSSSYSSYYY

SEQ ID NO: 657 - protein, 233 aa, Artificial
  YS33 Fab heavy chain
EVQLVESGGGLVQPGGSLRLSCAASGFYISSSSIHWVRQAPGKGLEWVAYISPSSGYTSYADSVKGRFTISADTSKNTAYLQMNSLRAEDTAVYYCSRYSSYSSSYSSYYYAMDYWGQGTLVTVSSASTKGPSVFPLAPSSKSTSGGTAALGCLVKDYFPEPVTVSWNSGALTSGVHTFPAVLQSSGLYSLSSVVTVPSSSLGTQTYICNVNHKPSNTKVDKKVEPKSCDKTH

SEQ ID NO: 658 - protein, 13 aa, Artificial
  YS34 CDR3 heavy chain
YSSSSYSSSSYYY

SEQ ID NO: 659 - protein, 233 aa, Artificial
  YS34 Fab heavy chain
EVQLVESGGGLVQPGGSLRLSCAASGFSISSSSIHWVRQAPGKGLEWVAYISPYSGSTSYADSVKGRFTISADTSKNTAYLQMNSLRAEDTAVYYCSRYSSSSYSSSSYYYAMDYWGQGTLVTVSSASTKGPSVFPLAPSSKSTSGGTAALGCLVKDYFPEPVTVSWNSGALTSGVHTFPAVLQSSGLYSLSSVVTVPSSSLGTQTYICNVNHKPSNTKVDKKVEPKSCDKTH

SEQ ID NO: 660 - protein, 13 aa, Artificial
  YS35 CDR3 heavy chain
YSSSSYSYSSYYY

SEQ ID NO: 661 - protein, 233 aa, Artificial
  YS35 Fab heavy chain
EVQLVESGGGLVQPGGSLRLSCAASGFSISSSSIHWVRQAPGKGLEWVAYISPSSGSTSYADSVKGRFTISADTSKNTAYLQMNSLRAEDTAVYYCSRYSSSSYSYSSYYYAMDYWGQGTLVTVSSASTKGPSVFPLAPSSKSTSGGTAALGCLVKDYFPEPVTVSWNSGALTSGVHTFPAVLQSSGLYSLSSVVTVPSSSLGTQTYICNVNHKPSNTKVDKKVEPKSCDKTH

SEQ ID NO: 662 - protein, 9 aa, Artificial
  YS36 CDR1 heavy chain
GFSIYSSSI

SEQ ID NO: 663 - protein, 13 aa, Artificial
  YS36 CDR3 heavy chain
YSSSSSSYSSYYY

SEQ ID NO: 664 - protein, 233 aa, Artificial
  YS36 Fab heavy chain
EVQLVESGGGLVQPGGSLRLSCAASGFSIYSSSIHWVRQAPGKGLEWVAYISPYSGSTYYADSVKGRFTISADTSKNTAYLQMNSLRAEDTAVYYCSRYSSSSSSYSSYYYAMDYWGQGTLVTVSSASTKGPSVFPLAPSSKSTSGGTAALGCLVKDYFPEPVTVSWNSGALTSGVHTFPAVLQSSGLYSLSSVVTVPSSSLGTQTYICNVNHKPSNTKVDKKVEPKSCDKTH

SEQ ID NO: 665 - protein, 13 aa, Artificial
  YS37 CDR3 heavy chain
YYSSSSSYSSYYY

SEQ ID NO: 666 - protein, 233 aa, Artificial
  YS37 Fab heavy chain
EVQLVESGGGLVQPGGSLRLSCAASGFSISSSSIHWVRQAPGKGLEWVAYISPYSGSTYYADSVKGRFTISADTSKNTAYLQMNSLRAEDTAVYYCSRYYSSSSSYSSYYYAMDYWGQGTLVTVSSASTKGPSVFPLAPSSKSTSGGTAALGCLVKDYFPEPVTVSWNSGALTSGVHTFPAVLQSSGLYSLSSVVTVPSSSLGTQTYICNVNHKPSNTKVDKKVEPKSCDKTH

SEQ ID NO: 667 - protein, 13 aa, Artificial
  YS38 CDR3 heavy chain
YSYSSYSSYSSYY

SEQ ID NO: 668 - protein, 233 aa, Artificial
  YS38 Fab heavy chain
EVQLVESGGGLVQPGGSLRLSCAASGFSIYSSSIHWVRQAPGKGLEWVAYISPSSGSTSYADSVKGRFTISADTSKNTAYLQMNSLRAEDTAVYYCSRYSYSSYSSYSSYYAMDYWGQGTLVTVSSASTKGPSVFPLAPSSKSTSGGTAALGCLVKDYFPEPVTVSWNSGALTSGVHTFPAVLQSSGLYSLSSVVTVPSSSLGTQTYICNVNHKPSNTKVDKKVEPKSCDKTH

SEQ ID NO: 669 - protein, 12 aa, Artificial
  YS39 CDR3 heavy chain
YYSSSYSYSYYY

SEQ ID NO: 670 - protein, 232 aa, Artificial
  YS39 Fab heavy chain
EVQLVESGGGLVQPGGSLRLSCAASGFSIYSSSIHWVRQAPGKGLEWVAYISPYSGSTSYADSVKGRFTISADTSKNTAYLQMNSLRAEDTAVYYCSRYYSSSYSYSYYYAMDYWGQGTLVTVSSASTKGPSVFPLAPSSKSTSGGTAALGCLVKDYFPEPVTVSWNSGALTSGVHTFPAVLQSSGLYSLSSVVTVPSSSLGTQTYICNVNHKPSNTKVDKKVEPKSCDKTH

SEQ ID NO: 671 - protein, 12 aa, Artificial
  YS40 CDR3 heavy chain
YYYSYSSYSYYY

SEQ ID NO: 672 - protein, 232 aa, Artificial
  YS40 Fab heavy chain
EVQLVESGGGLVQPGGSLRLSCAASGFSIYSSSIHWVRQAPGKGLEWVAYISPSSGSTSYADSVKGRFTISADTSKNTAYLQMNSLRAEDTAVYYCSRYYYSYSSYSYYYAMDYWGQGTLVTVSSASTKGPSVFPLAPSSKSTSGGTAALGCLVKDYFPEPVTVSWNSGALTSGVHTFPAVLQSSGLYSLSSVVTVPSSSLGTQTYICNVNHKPSNTKVDKKVEPKSCDKTH

SEQ ID NO: 673 - protein, 12 aa, Artificial
  YS41 CDR3 heavy chain
YSYSYSSYSYYY

SEQ ID NO: 674 - protein, 232 aa, Artificial
  YS41 Fab heavy chain
EVQLVESGGGLVQPGGSLRLSCAASGFSISSSSIHWVRQAPGKGLEWVAYISPSSGSTSYADSVKGRFTISADTSKNTAYLQMNSLRAEDTAVYYCSRYSYSYSSYSYYYAMDYWGQGTLVTVSSASTKGPSVFPLAPSSKSTSGGTAALGCLVKDYFPEPVTVSWNSGALTSGVHTFPAVLQSSGLYSLSSVVTVPSSSLGTQTYICNVNHKPSNTKVDKKVEPKSCDKTH

SEQ ID NO: 675 - protein, 12 aa, Artificial
  YS42 CDR3 heavy chain
YSSSSSYSSYYY

SEQ ID NO: 676 - protein, 232 aa, Artificial
  YS42 Fab heavy chain
EVQLVESGGGLVQPGGSLRLSCAASGFSISYSSIHWVRQAPGKGLEWVAYISPYSGSTSYADSVKGRFTISADTSKNTAYLQMNSLRAEDTAVYYCSRYSSSSSYSSYYYAMDYWGQGTLVTVSSASTKGPSVFPLAPSSKSTSGGTAALGCLVKDYFPEPVTVSWNSGALTSGVHTFPAVLQSSGLYSLSSVVTVPSSSLGTQTYICNVNHKPSNTKVDKKVEPKSCDKTH

SEQ ID NO: 677 - protein, 12 aa, Artificial
  YS43 CDR3 heavy chain
YSSSSYYYSYYY

SEQ ID NO: 678 - protein, 232 aa, Artificial
  YS43 Fab heavy chain
EVQLVESGGGLVQPGGSLRLSCAASGFSISSSSIHWVRQAPGKGLEWVAYISPYSGSTSYADSVKGRFTISADTSKNTAYLQMNSLRAEDTAVYYCSRYSSSSYYYSYYYAMDYWGQGTLVTVSSASTKGPSVFPLAPSSKSTSGGTAALGCLVKDYFPEPVTVSWNSGALTSGVHTFPAVLQSSGLYSLSSVVTVPSSSLGTQTYICNVNHKPSNTKVDKKVEPKSCDKTH

SEQ ID NO: 679 - protein, 12 aa, Artificial
  YS44 CDR3 heavy chain
YSSSSSYYSYYY

SEQ ID NO: 680 - protein, 232 aa, Artificial
  YS44 Fab heavy chain
EVQLVESGGGLVQPGGSLRLSCAASGFSIYSSSIHWVRQAPGKGLEWVAYISPSSGSTSYADSVKGRFTISADTSKNTAYLQMNSLRAEDTAVYYCSRYSSSSSYYSYYYAMDYWGQGTLVTVSSASTKGPSVFPLAPSSKSTSGGTAALGCLVKDYFPEPVTVSWNSGALTSGVHTFPAVLQSSGLYSLSSVVTVPSSSLGTQTYICNVNHKPSNTKVDKKVEPKSCDKTH

SEQ ID NO: 681 - protein, 12 aa, Artificial
  YS45 CDR3 heavy chain
YSSYSYYYSYYY

SEQ ID NO: 682 - protein, 232 aa, Artificial
  YS45 Fab heavy chain
EVQLVESGGGLVQPGGSLRLSCAASGFSISSSSIHWVRQAPGKGLEWVASISPYSGYTSYADSVKGRFTISADTSKNTAYLQMNSLRAEDTAVYYCSRYSSYSYYYSYYYAMDYWGQGTLVTVSSASTKGPSVFPLAPSSKSTSGGTAALGCLVKDYFPEPVTVSWNSGALTSGVHTFPAVLQSSGLYSLSSVVTVPSSSLGTQTYICNVNHKPSNTKVDKKVEPKSCDKTH

SEQ ID NO: 683 - protein, 12 aa, Artificial
  YS47 CDR3 heavy chain
YSSSSYSYSYYY

SEQ ID NO: 684 - protein, 232 aa, Artificial
  YS47 Fab heavy chain
EVQLVESGGGLVQPGGSLRLSCAASGFSIYSSSIHWVRQAPGKGLEWVAYISPSSGYTSYADSVKGRFTISADTSKNTAYLQMNSLRAEDTAVYYCSRYSSSSYSYSYYYAMDYWGQGTLVTVSSASTKGPSVFPLAPSSKSTSGGTAALGCLVKDYFPEPVTVSWNSGALTSGVHTFPAVLQSSGLYSLSSVVTVPSSSLGTQTYICNVNHKPSNTKVDKKVEPKSCDKTH

SEQ ID NO: 685 - protein, 12 aa, Artificial
  YS47 CDR3 heavy chain
YSSSYSSYSYYY

SEQ ID NO: 686 - protein, 232 aa, Artificial
  YS47 Fab heavy chain
EVQLVESGGGLVQPGGSLRLSCAASGFSISSSSIHWVRQAPGKGLEWVAYISPYSGSTSYADSVKGRFTISADTSKNTAYLQMNSLRAEDTAVYYCSRYSSSYSSYSYYYAMDYWGQGTLVTVSSASTKGPSVFPLAPSSKSTSGGTAALGCLVKDYFPEPVTVSWNSGALTSGVHTFPAVLQSSGLYSLSSVVTVPSSSLGTQTYICNVNHKPSNTKVDKKVEPKSCDKTH

SEQ ID NO: 687 - protein, 12 aa, Artificial
  YS48 CDR3 heavy chain
YSYSSSSSSYYY

SEQ ID NO: 688 - protein, 232 aa, Artificial
  YS48 Fab heavy chain
EVQLVESGGGLVQPGGSLRLSCAASGFSISSSSIHWVRQAPGKGLEWVAYISPYSGYTSYADSVKGRFTISADTSKNTAYLQMNSLRAEDTAVYYCSRYSYSSSSSSYYYAMDYWGQGTLVTVSSASTKGPSVFPLAPSSKSTSGGTAALGCLVKDYFPEPVTVSWNSGALTSGVHTFPAVLQSSGLYSLSSVVTVPSSSLGTQTYICNVNHKPSNTKVDKKVEPKSCDKTH

SEQ ID NO: 689 - protein, 12 aa, Artificial
  YS49 CDR3 heavy chain
YSSSYYYYSYSY

SEQ ID NO: 690 - protein, 232 aa, Artificial
  YS49 Fab heavy chain
EVQLVESGGGLVQPGGSLRLSCAASGFSIYSSSIHWVRQAPGKGLEWVAYISPYSGSTSYADSVKGRFTISADTSKNTAYLQMNSLRAEDTAVYYCSRYSSSYYYYSYSYAMDYWGQGTLVTVSSASTKGPSVFPLAPSSKSTSGGTAALGCLVKDYFPEPVTVSWNSGALTSGVHTFPAVLQSSGLYSLSSVVTVPSSSLGTQTYICNVNHKPSNTKVDKKVEPKSCDKTH

SEQ ID NO: 691 - protein, 11 aa, Artificial
  YS50 CDR3 heavy chain
YSSSYYYSYYY

SEQ ID NO: 692 - protein, 231 aa, Artificial
  YS50 Fab heavy chain
EVQLVESGGGLVQPGGSLRLSCAASGFSISSSSIHWVRQAPGKGLEWVAYISPSSGSTSYADSVKGRFTISADTSKNTAYLQMNSLRAEDTAVYYCSRYSSSYYYSYYYAMDYWGQGTLVTVSSASTKGPSVFPLAPSSKSTSGGTAALGCLVKDYFPEPVTVSWNSGALTSGVHTFPAVLQSSGLYSLSSVVTVPSSSLGTQTYICNVNHKPSNTKVDKKVEPKSCDKTH

SEQ ID NO: 693 - protein, 11 aa, Artificial
  YS51 CDR3 heavy chain
YSSSYSYSYYY

SEQ ID NO: 694 - protein, 231 aa, Artificial
  YS51 Fab heavy chain
EVQLVESGGGLVQPGGSLRLSCAASGFSISSSSIHWVRQAPGKGLEWVAYISPYSGSTSYADSVKGRFTISADTSKNTAYLQMNSLRAEDTAVYYCSRYSSSYSYSYYYAMDYWGQGTLVTVSSASTKGPSVFPLAPSSKSTSGGTAALGCLVKDYFPEPVTVSWNSGALTSGVHTFPAVLQSSGLYSLSSVVTVPSSSLGTQTYICNVNHKPSNTKVDKKVEPKSCDKTH

SEQ ID NO: 695 - protein, 9 aa, Artificial
  YS52 CDR1 heavy chain
GFSISSSYI

SEQ ID NO: 696 - protein, 17 aa, Artificial
  YS52 CDR2 heavy chain
SIYPYYGYTSYADSVKG

SEQ ID NO: 697 - protein, 8 aa, Artificial
  YS52 CDR3 heavy chain
SSSSSYYS

SEQ ID NO: 698 - protein, 228 aa, Artificial
  YS52 Fab heavy chain
EVQLVESGGGLVQPGGSLRLSCAASGFSISSSYIHWVRQAPGKGLEWVASIYPYYGYTSYADSVKGRFTISADTSKNTAYLQMNSLRAEDTAVYYCSRSSSSSYYSAMDYWGQGTLVTVSSASTKGPSVFPLAPSSKSTSGGTAALGCLVKDYFPEPVTVSWNSGALTSGVHTFPAVLQSSGLYSLSSVVTVPSSSLGTQTYICNVNHKPSNTKVDKKVEPKSCDKTH

SEQ ID NO: 699 - protein, 17 aa, Artificial
  YS53 CDRH2
SISPYSGYTYYADSVKG

SEQ ID NO: 700 - protein, 13 aa, Artificial
  YS53 CDRH3
SYYSSSYSSYYSS

SEQ ID NO: 701 - protein, 233 aa, Artificial
  YS53 Fab heavy chain
EVQLVESGGGLVQPGGSLRLSCAASGFYISSSSIHWVRQAPGKGLEWVASISPYSGYTYYADSVKGRFTISADTSKNTAYLQMNSLRAEDTAVYYCSRSYYSSSYSSYYSSAMDYWGQGTLVTVSSASTKGPSVFPLAPSSKSTSGGTAALGCLVKDYFPEPVTVSWNSGALTSGVHTFPAVLQSSGLYSLSSVVTVPSSSLGTQTYICNVNHKPSNTKVDKKVEPKSCDKTH

SEQ ID NO: 702 - protein, 17 aa, Artificial
  YS54 CDRH2
SISPSSGSTYYADSVKG

SEQ ID NO: 703 - protein, 233 aa, Artificial
  YS54 Fab heavy chain
EVQLVESGGGLVQPGGSLRLSCAASGFSISSSSIHWVRQAPGKGLEWVASISPSSGSTYYADSVKGRFTISADTSKNTAYLQMNSLRAEDTAVYYCSRSYYSSSYSSYYSSAMDYWGQGTLVTVSSASTKGPSVFPLAPSSKSTSGGTAALGCLVKDYFPEPVTVSWNSGALTSGVHTFPAVLQSSGLYSLSSVVTVPSSSLGTQTYICNVNHKPSNTKVDKKVEPKSCDKTH

SEQ ID NO: 704 - protein, 13 aa, Artificial
  YS55 CDRH3
SYYSSSYYSYYSS

SEQ ID NO: 705 - protein, 233 aa, Artificial
  YS55 Fab heavy chain
EVQLVESGGGLVQPGGSLRLSCAASGFSISSSSIHWVRQAPGKGLEWVASISPSSGSTYYADSVKGRFTISADTSKNTAYLQMNSLRAEDTAVYYCSRSYYSSSYYSYYSSAMDYWGQGTLVTVSSASTKGPSVFPLAPSSKSTSGGTAALGCLVKDYFPEPVTVSWNSGALTSGVHTFPAVLQSSGLYSLSSVVTVPSSSLGTQTYICNVNHKPSNTKVDKKVEPKSCDKTH

SEQ ID NO: 706 - protein, 233 aa, Artificial
  YS56 Fab heavy chain
EVQLVESGGGLVQPGGSLRLSCAASGFSISSSSIHWVRQAPGKGLEWVASISPYSGYTYYADSVKGRFTISADTSKNTAYLQMNSLRAEDTAVYYCSRSYYSSSYYSYYSSAMDYWGQGTLVTVSSASTKGPSVFPLAPSSKSTSGGTAALGCLVKDYFPEPVTVSWNSGALTSGVHTFPAVLQSSGLYSLSSVVTVPSSSLGTQTYICNVNHKPSNTKVDKKVEPKSCDKTH

SEQ ID NO: 707 - protein, 17 aa, Artificial
  YS57 CDRH2
SISPYSGSTYYADSVKG

SEQ ID NO: 708 - protein, 233 aa, Artificial
  YS57 Fab heavy chain
EVQLVESGGGLVQPGGSLRLSCAASGFYISSSSIHWVRQAPGKGLEWVASISPYSGSTYYADSVKGRFTISADTSKNTAYLQMNSLRAEDTAVYYCSRSYYSSSYYSYYSSAMDYWGQGTLVTVSSASTKGPSVFPLAPSSKSTSGGTAALGCLVKDYFPEPVTVSWNSGALTSGVHTFPAVLQSSGLYSLSSVVTVPSSSLGTQTYICNVNHKPSNTKVDKKVEPKSCDKTH

SEQ ID NO: 709 - protein, 13 aa, Artificial
  YS58 CDRH3
SYYSSSYYYYYSS

SEQ ID NO: 710 - protein, 233 aa, Artificial
  YS58 Fab heavy chain
EVQLVESGGGLVQPGGSLRLSCAASGFSISSSSIHWVRQAPGKGLEWVASISPYSGSTYYADSVKGRFTISADTSKNTAYLQMNSLRAEDTAVYYCSRSYYSSSYYYYYSSAMDYWGQGTLVTVSSASTKGPSVFPLAPSSKSTSGGTAALGCLVKDYFPEPVTVSWNSGALTSGVHTFPAVLQSSGLYSLSSVVTVPSSSLGTQTYICNVNHKPSNTKVDKKVEPKSCDKTH

SEQ ID NO: 711 - protein, 17 aa, Artificial
  YS59 CDRH2
SISPSYGYTSYADSVKG

SEQ ID NO: 712 - protein, 13 aa, Artificial
  YS59 CDRH3
SYYSSSYSSYYSS

SEQ ID NO: 713 - protein, 233 aa, Artificial
  YS59 Fab heavy chain
EVQLVESGGGLVQPGGSLRLSCAASGFSISSSSIHWVRQAPGKGLEWVASISPSYGYTSYADSVKGRFTISADTSKNTAYLQMNSLRAEDTAVYYCSRSYYSSSYSSYYSSAMDYWGQGTLVTVSSASTKGPSVFPLAPSSKSTSGGTAALGCLVKDYFPEPVTVSWNSGALTSGVHTFPAVLQSSGLYSLSSVVTVPSSSLGTQTYICNVNHKPSNTKVDKKVEPKSCDKTH

SEQ ID NO: 714 - protein, 233 aa, Artificial
  YS60 Fab heavy chain
EVQLVESGGGLVQPGGSLRLSCAASGFSISSSSIHWVRQAPGKGLEWVASISPYSGSTYYADSVKGRFTISADTSKNTAYLQMNSLRAEDTAVYYCSRSYYSSSYSSYYSSAMDYWGQGTLVTVSSASTKGPSVFPLAPSSKSTSGGTAALGCLVKDYFPEPVTVSWNSGALTSGVHTFPAVLQSSGLYSLSSVVTVPSSSLGTQTYICNVNHKPSNTKVDKKVEPKSCDKTH

SEQ ID NO: 715 - protein, 9 aa, Artificial
  YS61 CDRH1
GFSISSYSI

SEQ ID NO: 716 - protein, 17 aa, Artificial
  YS61 CDRH2
SISPYSGSTYYADSVKG

SEQ ID NO: 717 - protein, 233 aa, Artificial
  YS61 Fab heavy chain
EVQLVESGGGLVQPGGSLRLSCAASGFSISSYSIHWVRQAPGKGLEWVASISPYSGSTYYADSVKGRFTISADTSKNTAYLQMNSLRAEDTAVYYCSRSYYYSSYSSYYSSAMDYWGQGTLVTVSSASTKGPSVFPLAPSSKSTSGGTAALGCLVKDYFPEPVTVSWNSGALTSGVHTFPAVLQSSGLYSLSSVVTVPSSSLGTQTYICNVNHKPSNTKVDKKVEPKSCDKTH

SEQ ID NO: 718 - protein, 17 aa, Artificial
  YS62 CDRH2
SISPSSGYTYYADSVKG

SEQ ID NO: 719 - protein, 13 aa, Artificial
  YS62 CDRH3
SYYSSSYSSYYSS

SEQ ID NO: 720 - protein, 233 aa, Artificial
  YS62 Fab heavy chain
EVQLVESGGGLVQPGGSLRLSCAASGFSISYSSIHWVRQAPGKGLEWVASISPSSGYTYYADSVKGRFTISADTSKNTAYLQMNSLRAEDTAVYYCSRSYYSSSYSSYYSSAMDYWGQGTLVTVSSASTKGPSVFPLAPSSKSTSGGTAALGCLVKDYFPEPVTVSWNSGALTSGVHTFPAVLQSSGLYSLSSVVTVPSSSLGTQTYICNVNHKPSNTKVDKKVEPKSCDKTH

SEQ ID NO: 721 - protein, 13 aa, Artificial
  YS63 CDRH3
SSYSSSYYSYYSS

SEQ ID NO: 722 - protein, 233 aa, Artificial
  YS63 Fab heavy chain.
EVQLVESGGGLVQPGGSLRLSCAASGFSISSSSIHWVRQAPGKGLEWVASISPYSGYTYYADSVKGRFTISADTSKNTAYLQMNSLRAEDTAVYYCSRSSYSSSYYSYYSSAMDYWGQGTLVTVSSASTKGPSVFPLAPSSKSTSGGTAALGCLVKDYFPEPVTVSWNSGALTSGVHTFPAVLQSSGLYSLSSVVTVPSSSLGTQTYICNVNHKPSNTKVDKKVEPKSCDKTH

SEQ ID NO: 723 - protein, 17 aa, Artificial
  NNK1 CDRH2
SIAPYAGATAYADSVKG

SEQ ID NO: 724 - protein, 11 aa, Artificial
  NNK1 CDRH3
ESLAHWSAMDY

SEQ ID NO: 725 - protein, 250 aa, Artificial
  YADS2  heavy chain variant
MKKNIAFLLASMFVFSIATNAYAEVQLVESGGGLVQPGGSLRLSCAASGFAIYDYDIHWVRQAPGKGLEWVASIAPYAGATAYADSVKGRFTISADTSKNTAYLQMNSLRAEDTAVYYCSRESLAHWSAMDYWGQGTLVTVSSASTKGPSVFPLAPSSKSTSGGTAALGCLVKDYFPEPVTVSWNSGALTSGVHTFPAVLQSSGLYSLSSVVTVPSSSLGTQTYICNVNHKPSNTKVDKKVEPKSCDKTH

SEQ ID NO: 726 - protein, 17 aa, Artificial
  NNK2 CDRH2
LIAPYAGATAYADSVKG

SEQ ID NO: 727 - protein, 11 aa, Artificial
  NNK2 CDRH3
SSFAFWLAMDY

SEQ ID NO: 728 - protein, 250 aa, Artificial
  YADS2 heavy chain variant
MKKNIAFLLASMFVFSIATNAYAEVQLVESGGGLVQPGGSLRLSCAASGFAIYDYDIHWVRQAPGKGLEWVALIAPYAGATAYADSVKGRFTISADTSKNTAYLQMNSLRAEDTAVYYCSRSSFAFWLAMDYWGQGTLVTVSSASTKGPSVFPLAPSSKSTSGGTAALGCLVKDYFPEPVTVSWNSGALTSGVHTFPAVLQSSGLYSLSSVVTVPSSSLGTQTYICNVNHKPSNTKVDKKVEPKSCDKTH

SEQ ID NO: 729 - protein, 17 aa, Artificial
  NNK3 CDRH2
MIAPYAGATAYADSVKG

SEQ ID NO: 730 - protein, 11 aa, Artificial
  NNK3 CDRH3
TSFAFWNAMDY

SEQ ID NO: 731 - protein, 250 aa, Artificial
  YADS2 heavy chain variant
MKKNIAFLLASMFVFSIATNAYAEVQLVESGGGLVQPGGSLRLSCAASGFAIYDYDIHWVRQAPGKGLEWVAMIAPYAGATAYADSVKGRFTISADTSKNTAYLQMNSLRAEDTAVYYCSRTSFAFWNAMDYWGQGTLVTVSSASTKGPSVFPLAPSSKSTSGGTAALGCLVKDYFPEPVTVSWNSGALTSGVHTFPAVLQSSGLYSLSSVVTVPSSSLGTQTYICNVNHKPSNTKVDKKVEPKSCDKTH

SEQ ID NO: 732 - protein, 17 aa, Artificial
  NNK4 CDRH2
RIAPYAGATAYADSVKG

SEQ ID NO: 733 - protein, 11 aa, Artificial
  NNK4 CDRH3
SSFAFFSAMDY

SEQ ID NO: 734 - protein, 250 aa, Artificial
  YADS2 heavy chain variant
MKKNIAFLLASMFVFSIATNAYAEVQLVESGGGLVQPGGSLRLSCAASGFAIYDYDIHWVRQAPGKGLEWVARIAPYAGATAYADSVKGRFTISADTSKNTAYLQMNSLRAEDTAVYYCSRSSFAFFSAMDYWGQGTLVTVSSASTKGPSVFPLAPSSKSTSGGTAALGCLVKDYFPEPVTVSWNSGALTSGVHTFPAVLQSSGLYSLSSVVTVPSSSLGTQTYICNVNHKPSNTKVDKKVEPKSCDKTH

SEQ ID NO: 735 - protein, 17 aa, Artificial
  NNK5 CDRH2
SIAPYAGATAYADSVKG

SEQ ID NO: 736 - protein, 11 aa, Artificial
  NNK5 CDRH3
ASFAFFSAMDY

SEQ ID NO: 737 - protein, 250 aa, Artificial
  YADS2 heavy chain variant
MKKNIAFLLASMFVFSIATNAYAEVQLVESGGGLVQPGGSLRLSCAASGFAIYDYDIHWVRQAPGKGLEWVASIAPYAGATAYADSVKGRFTISADTSKNTAYLQMNSLRAEDTAVYYCSRASFAFFSAMDYWGQGTLVTVSSASTKGPSVFPLAPSSKSTSGGTAALGCLVKDYFPEPVTVSWNSGALTSGVHTFPAVLQSSGLYSLSSVVTVPSSSLGTQTYICNVNHKPSNTKVDKKVEPKSCDKTH

SEQ ID NO: 738 - protein, 11 aa, Artificial
  NNK6 CDRH2
  MISC_FEATURE (1)..(1): Xaa is any naturally occurring amino acid or a stop codon
XSLALYDAMDY

SEQ ID NO: 739 - protein, 250 aa, Artificial
  YADS2 Heavy Chain Variant
  MISC_FEATURE (122)..(122): Xaa is any naturally occurring amino acid or a stop codon
MKKNIAFLLASMFVFSIATNAYAEVQLVESGGGLVQPGGSLRLSCAASGFAIYDYDIHWVRQAPGKGLEWVADIAPYAGATAYADSVKGRFTISADTSKNTAYLQMNSLRAEDTAVYYCSRXSLALYDAMDYWGQGTLVTVSSASTKGPSVFPLAPSSKSTSGGTAALGCLVKDYFPEPVTVSWNSGALTSGVHTFPAVLQSSGLYSLSSVVTVPSSSLGTQTYICNVNHKPSNTKVDKKVEPKSCDKTH

SEQ ID NO: 740 - protein, 17 aa, Artificial
  NNK7 CDRH2
YIAPYAGATAYADSVKG

SEQ ID NO: 741 - protein, 11 aa, Artificial
  NNK7 CDRH3
FSFAFRMAMDY

SEQ ID NO: 742 - protein, 250 aa, Artificial
  YADS2 heavy chain variant
MKKNIAFLLASMFVFSIATNAYAEVQLVESGGGLVQPGGSLRLSCAASGFAIYDYDIHWVRQAPGKGLEWVAYIAPYAGATAYADSVKGRFTISADTSKNTAYLQMNSLRAEDTAVYYCSRFSFAFRMAMDYWGQGTLVTVSSASTKGPSVFPLAPSSKSTSGGTAALGCLVKDYFPEPVTVSWNSGALTSGVHTFPAVLQSSGLYSLSSVVTVPSSSLGTQTYICNVNHKPSNTKVDKKVEPKSCDKTH

SEQ ID NO: 743 - protein, 17 aa, Artificial
  NNK8 CDRH2
GIAPYAGATAYADSVKG

SEQ ID NO: 744 - protein, 11 aa, Artificial
  NNK8 CDRH3
GSFAFFGAMDY

SEQ ID NO: 745 - protein, 250 aa, Artificial
  YADS2 heavy chain variant
MKKNIAFLLASMFVFSIATNAYAEVQLVESGGGLVQPGGSLRLSCAASGFAIYDYDIHWVRQAPGKGLEWVAGIAPYAGATAYADSVKGRFTISADTSKNTAYLQMNSLRAEDTAVYYCSRGSFAFFGAMDYWGQGTLVTVSSASTKGPSVFPLAPSSKSTSGGTAALGCLVKDYFPEPVTVSWNSGALTSGVHTFPAVLQSSGLYSLSSVVTVPSSSLGTQTYICNVNHKPSNTKVDKKVEPKSCDKTH

SEQ ID NO: 746 - protein, 17 aa, Artificial
  NNK9 CDRH2
LIAPYADATAYADSVKG

SEQ ID NO: 747 - protein, 11 aa, Artificial
  NNK9 CDRH3
SSYARWSAMDY

SEQ ID NO: 748 - protein, 249 aa, Artificial
  YADS2 heavy chain variant
MKKNIAFLLASMFVFSIATNAYAEVQLVESGGGLVQPGGSLRLSCAASGFAIYDYDIHWVRQAPGKGLEWALIAPYADATAYADSVKGRFTISADTSKNTAYLQMNSLRAEDTAVYYCSRSSYARWSAMDYWGQGTLVTVSSASTKGPSVFPLAPSSKSTSGGTAALGCLVKDYFPEPVTVSWNSGALTSGVHTFPAVLQSSGLYSLSSVVTVPSSSLGTQTYICNVNHKPSNTKVDKKVEPKSCDKTH

SEQ ID NO: 749 - protein, 17 aa, Artificial
  NNK10 CDRH2
YIAPYAGATAYADSVKG

SEQ ID NO: 750 - protein, 11 aa, Artificial
  NNK10 CDRH3
SSYAFFRAMDY

SEQ ID NO: 751 - protein, 250 aa, Artificial
  YADS2 heavy chain variant
MKKNIAFLLASMFVFSIATNAYAEVQLVESGGGLVQPGGSLRLSCAASGFAIYDYDIHWVRQAPGKGLEWVAYIAPYAGATAYADSVKGRFTISADTSKNTAYLQMNSLRAEDTAVYYCSRSSYAFFRAMDYWGQGTLVTVSSASTKGPSVFPLAPSSKSTSGGTAALGCLVKDYFPEPVTVSWNSGALTSGVHTFPAVLQSSGLYSLSSVVTVPSSSLGTQTYICNVNHKPSNTKVDKKVEPKSCDKTH

SEQ ID NO: 752 - protein, 17 aa, Artificial
  NNK11 CDRH2
IIAPYAGATAYADSVKG

SEQ ID NO: 753 - protein, 11 aa, Artificial
  NNK11 CDRH3
SSYAFFRAMDY

SEQ ID NO: 754 - protein, 250 aa, Artificial
  YADS2 heavy chain variant
MKKNIAFLLASMFVFSIATNAYAEVQLVESGGGLVQPGGSLRLSCAASGFAIYDYDIHWVRQAPGKGLEWVHIIAPYAGATAYADSVKGRFTISADTSKNTAYLQMNSLRAEDTAVYYCSASSYAFFRAMDYWGQGTLVTVSSASTKGPSVFPLAPSSKSTSGGTAALGCLVKDYFPEPVTVSWNSGALTSGVHTFPAVLQSSGLYSLSSVVTVPSSSLGTQTYICNVNHKPSNTKVDKKVEPKSCDKTH

SEQ ID NO: 755 - protein, 17 aa, Artificial
  NNK12 CDRH2
VIAPYAGATAYADSVKG

SEQ ID NO: 756 - protein, 11 aa, Artificial
  NNK12 CDRH3
NSFAFFGAMDY

SEQ ID NO: 757 - protein, 250 aa, Artificial
  YADS2 heavy chain variant
MKKNIAFLLASMFVFSIATNAYAEVQLVESGGGLVQPGGSLRLSCAASGFAIYDYDIHWVRQAPGKGLEWVAVIAPYAGATAYADSVKGRFTISADTSKNTAYLQMNSLRAEDTAVYYCSRNSFAFFGAMDYWGQGTLVTVSSASTKGPSVFPLAPSSKSTSGGTAALGCLVKDYFPEPVTVSWNSGALTSGVHTFPAVLQSSGLYSLSSVVTVPSSSLGTQTYICNVNHKPSNTKVDKKVEPKSCDKTH

SEQ ID NO: 758 - protein, 17 aa, Artificial
  NNK13 CDRH2
FIAPYAGATAYADSVKG

SEQ ID NO: 759 - protein, 11 aa, Artificial
  NNK13 CDRH3
SSFAFWMAMDY

SEQ ID NO: 760 - protein, 250 aa, Artificial
  YADS2 heavy chain variant
MKKNIAFLLASMFVFSIATNAYAEVQLVESGGGLVQPGGSLRLSCAASGFAIYDYDIHWVRQAPGKGLEWVAFIAPYAGATAYADSVKGRFTISADTSKNTAYLQMNSLRAEDTAVYYCSRSSFAFWMAMDYWGQGTLVTVSSASTKGPSVFPLAPSSKSTSGGTAALGCLVKDYFPEPVTVSWNSGALTSGVHTFPAVLQSSGLYSLSSVVTVPSSSLGTQTYICNVNHKPSNTKVDKKVEPKSCDKTH

SEQ ID NO: 761 - protein, 11 aa, Artificial
  NNK14 CDRH3
GSFAFWSAMDY

SEQ ID NO: 762 - protein, 250 aa, Artificial
  YADS2 heavy chain variant
MKKNIAFLLASMFVFSIATNAYAEVQLVESGGGLVQPGGSLRLSCAASGFAIYDYDIHWVRQAPGKGLEWVAFIAPYAGATAYADSVKGRFTISADTSKNTAYLQMNSLRAEDTAVYYCSRGSFAFWSAMDYWGQGTLVTVSSASTKGPSVFPLAPSSKSTSGGTAALGCLVKDYFPEPVTVSWNSGALTSGVHTFPAVLQSSGLYSLSSVVTVPSSSLGTQTYICNVNHKPSNTKVDKKVEPKSCDKTH

SEQ ID NO: 763 - protein, 11 aa, Artificial
  NNK15 CDRH3
NSFAFFGAMDY

SEQ ID NO: 764 - protein, 250 aa, Artificial; identical to SEQ ID NO: 757
  YADS2 heavy chain variant

SEQ ID NO: 765 - protein, 17 aa, Artificial
  NNK16 CDRH2
NIAPYAGATAYADSVKG

SEQ ID NO: 766 - protein, 11 aa, Artificial
  NNK16 CDRH3
SSFAFFMAMDY

SEQ ID NO: 767 - protein, 250 aa, Artificial
  YADS2 heavy chain variant
MKKNIAFLLASMFVFSIATNAYAEVQLVESGGGLVQPGGSLRLSCAASGFAIYDYDIHWVRQAPGKGLEWVANIAPYAGATAYADSVKGRFTISADTSKNTAYLQMNSLRAEDTAVYYCSRSSFAFFMAMDYWGQGTLVTVSSASTKGPSVFPLAPSSKSTSGGTAALGCLVKDYFPEPVTVSWNSGALTSGVHTFPAVLQSSGLYSLSSVVTVPSSSLGTQTYICNVNHKPSNTKVDKKVEPKSCDKTH

SEQ ID NO: 768 - protein, 17 aa, Artificial
  NNK17 CDRH2
VIAPYAGATAYADSVKG

SEQ ID NO: 769 - protein, 250 aa, Artificial; identical to SEQ ID NO: 757
  YADS2 heavy chain variant

SEQ ID NO: 770 - protein, 17 aa, Artificial
  NNK18 CDRH2
FIAPYAGATAYADSVKG

SEQ ID NO: 771 - protein, 11 aa, Artificial
  NNK18 CDRH3
RSFAFYNAMDY

SEQ ID NO: 772 - protein, 250 aa, Artificial
  YADS2 heavy chain variant
MKKNIAFLLASMFVFSIATNAYAEVQLVESGGGLVQPGGSLRLSCAASGFAIYDYDIHWVRQAPGKGLEWVAFIAPYAGATAYADSVKGRFTISADTSKNTAYLQMNSLRAEDTAVYYCSRRSFAFYNAMDYWGQGTLVTVSSASTKGPSVFPLAPSSKSTSGGTAALGCLVKDYFPEPVTVSWNSGALTSGVHTFPAVLQSSGLYSLSSVVTVPSSSLGTQTYICNVNHKPSNTKVDKKVEPKSCDKTH

SEQ ID NO: 773 - protein, 11 aa, Artificial
  NNK19 CDRH3
SSFAFYGAMDY

SEQ ID NO: 774 - protein, 250 aa, Artificial
  YADS2 heavy chain variant
MKKNIAFLLASMFVFSIATNAYAEVQLVESGGGLVQPGGSLRLSCAASGFAIYDYDIHWVRQAPGKGLEWVAFIAPYAGATAYADSVKGRFTISADTSKNTAYLQMNSLRAEDTAVYYCSRSSFAFYGAMDYWGQGTLVTVSSASTKGPSVFPLAPSSKSTSGGTAALGCLVKDYFPEPVTVSWNSGALTSGVHTFPAVLQSSGLYSLSSVVTVPSSSLGTQTYICNVNHKPSNTKVDKKVEPKSCDKTH

SEQ ID NO: 775 - protein, 11 aa, Artificial
  NNK20 CDRH3
SSFAFKAAMDY

SEQ ID NO: 776 - protein, 250 aa, Artificial
  YADS2 heavy chain variant
MKKNIAFLLASMFVFSIATNAYAEVQLVESGGGLVQPGGSLRLSCAASGFAIYDYDIHWVRQAPGKGLEWVAFIAPYAGATAYADSVKGRFTISADTSKNTAYLQMNSLRAEDTAVYYCSRSSFAFKAAMDYWGQGTLVTVSSASTKGPSVFPLAPSSKSTSGGTAALGCLVKDYFPEPVTVSWNSGALTSGVHTFPAVLQSSGLYSLSSVVTVPSSSLGTQTYICNVNHKPSNTKVDKKVEPKSCDKTH

SEQ ID NO: 777 - protein, 17 aa, Artificial
  NNK21 CDRH2
AIAPYAGATAYADSVKG

SEQ ID NO: 778 - protein, 11 aa, Artificial
  NNK21 CDRH3
LSFALYNAMDY

SEQ ID NO: 779 - protein, 250 aa, Artificial
  YADS2 heavy chain variant
MKKNIAFLLASMFVFSIATNAYAEVQLVESGGGLVQPGGSLRLSCAASGFAIYDYDIHWVRQAPGKGLEWVAAIAPYAGATAYADSVKGRFTISADTSKNTAYLQMNSLRAEDTAVYYCSRLSFALYNAMDYWGQGTLVTVSSASTKGPSVFPLAPSSKSTSGGTAALGCLVKDYFPEPVTVSWNSGALTSGVHTFPAVLQSSGLYSLSSVVTVPSSSLGTQTYICNVNHKPSNTKVDKKVEPKSCDKTH

SEQ ID NO: 780 - protein, 17 aa, Artificial
  NNK22 CDRH2
YIAPYAGATAYADSVKG

SEQ ID NO: 781 - protein, 11 aa, Artificial
  NNK22 CDRH3
VSWAFFQAMDY

SEQ ID NO: 782 - protein, 250 aa, Artificial
  YADS2 heavy chain variant
MKKNIAFLLASMFVFSIATNAYAEVQLVESGGGLVQPGGSLRLSCAASGFAIYDYDIHWVRQAPGKGLEWVAYIAPYAGATAYADSVKGRFTISADTSKNTAYLQMNSLRAEDTAVYYCSRVSWAFFQAMDYWGQGTLVTVSSASTKGPSVFPLAPSSKSTSGGTAALGCLVKDYFPEPVTVSWNSGALTSGVHTFPAVLQSSGLYSLSSVVTVPSSSLGTQTYICNVNHKPSNTKVDKKVEPKSCDKTH

SEQ ID NO: 783 - protein, 17 aa, Artificial
  NNK23 CDRH2
WIAPYAGATAYADSVKG

SEQ ID NO: 784 - protein, 11 aa, Artificial
  NNK23 CDRH3
LSLAYFHAMDY

SEQ ID NO: 785 - protein, 250 aa, Artificial
  YADS2 heavy chain variant
MKKNIAFLLASMFVFSIATNAYAEVQLVESGGGLVQPGGSLRLSCAASGFAIYDYDIHWVRQAPGKGLEWVAWIAPYAGATAYADSVKGRFTISADTSKNTAYLQMNSLRAEDTAVYYCSRLSLAYFHAMDYWGQGTLVTVSSASTKGPSVFPLAPSSKSTSGGTAALGCLVKDYFPEPVTVSWNSGALTSGVHTFPAVLQSSGLYSLSSVVTVPSSSLGTQTYICNVNHKPSNTKVDKKVEPKSCDKTH

SEQ ID NO: 786 - protein, 17 aa, Artificial
  NNK24 CDRH2
VIAPYAGATAYADSVKG

SEQ ID NO: 787 - protein, 11 aa, Artificial
  NNK24 CDRH3
NSFAFFGAMDY

SEQ ID NO: 788 - protein, 250 aa, Artificial; identical to SEQ ID NO: 757
  YADS2 heavy chain variant

SEQ ID NO: 789 - protein, 11 aa, Artificial
  NNK25 CDRH3
ISFAFFGAMDY

SEQ ID NO: 790 - protein, 250 aa, Artificial
  YADS2 heavy chain variant
MKKNIAFLLASMFVFSIATNAYAEVQLVESGGGLVQPGGSLRLSCAASGFAIYDYDIHWVRQAPGKGLEWVAVIAPYAGATAYADSVKGRFTISADTSKNTAYLQMNSLRAEDTAVYYCSRISFAFFGAMDYWGQGTLVTVSSASTKGPSVFPLAPSSKSTSGGTAALGCLVKDYFPEPVTVSWNSGALTSGVHTFPAVLQSSGLYSLSSVVTVPSSSLGTQTYICNVNHKPSNTKVDKKVEPKSCDKTH

SEQ ID NO: 791 - protein, 11 aa, Artificial
  NNK26 CDRH3
SSFAHMHAMDY

SEQ ID NO: 792 - protein, 250 aa, Artificial
  YADS2 heavy chain variant
MKKNIAFLLASMFVFSIATNAYAEVQLVESGGGLVQPGGSLRLSCAASGFAIYDYDIHWVRQAPGKGLEWVASIAPYAGATAYADSVKGRFTISADTSKNTAYLQMNSLRAEDTAVYYCSRSSFAHMHAMDYWGQGTLVTVSSASTKGPSVFPLAPSSKSTSGGTAALGCLVKDYFPEPVTVSWNSGALTSGVHTFPAVLQSSGLYSLSSVVTVPSSSLGTQTYICNVNHKPSNTKVDKKVEPKSCDKTH

SEQ ID NO: 793 - protein, 17 aa, Artificial
  NNK27 CDRH2
VIAPYAGATAYADSVKG

SEQ ID NO: 794 - protein, 250 aa, Artificial
  YADS2 heavy chain variant
MKKNIAFLLASMFVFSIATNAYAEVQLVESGGGLVQPGGSLRLSCAASGFAIYDYDIHWVRQAPGKGLEWVAVIAPYAGATAYADSVKGRFTISADTSKNTAYLQMNSLRAEDTAVYYCSRNSFAFFGDMDYWGQGTLVTVSSASTKGPSVFPLAPSSKSTSGGTAALGCLVKDYFPEPVTVSWNSGALTSGVHTFPAVLQSSGLYSLSSVVTVPSSSLGTQTYICNVNHKPSNTKVDKKVEPKSCDKTH

SEQ ID NO: 795 - protein, 10 aa, Artificial
  YS #1 CDR-H1
GFYISSSSIH

SEQ ID NO: 796 - protein, 17 aa, Artificial
  YS #1 CDR-H2
SISPSSGSTIYADSVKG

SEQ ID NO: 797 - protein, 15 aa, Artificial
  YS #1 CDR-H3
YYSSSSSYSYSAMDY

SEQ ID NO: 798 - protein, 231 aa, Artificial
  YS #1 HC
EVQLVESGGGLVQPGGSLRLSCAASGFYISSSSIHWVRQAPGKGLEWVASISPSSGSTIYADSVKGRFTISADTSKNTAYLQMNSLRAEDTAVYYCSRYYSSSSSYSYSAMDYWGQGTLVTVSSASTKGPSVFPLAPSSKSTSGGTAALGCLVKDYFPEPVTVSWNSGALTSGVHTFPAVLQSSGLYSLSSVVTVPSSSLGTQTYICNVNHKPSNTKVDKKVEPKSCDKTH

SEQ ID NO: 799 - protein, 5 aa, Artificial
  YS #2 CDR-H1
GFIIH

SEQ ID NO: 800 - protein, 17 aa, Artificial
  YS #2 CDR-H2
YIYPSYGSTSYADSVKG

SEQ ID NO: 801 - protein, 17 aa, Artificial
  YS #2 CDR-H3
YYYSSYSSSYYSSAMDY

SEQ ID NO: 802 - protein, 228 aa, Artificial
  YS #2 HC
EVQLVESGGGLVQPGGSLRLSCAASGFIIHWVRQAPGKGLEWVAYIYPSYGSTSYADSVKGRFTISADTSKNTAYLQMNSLRAEDTAVYYCSRYYYSSYSSSYYSSAMDYWGQGTLVTVSSASTKGPSVFPLAPSSKSTSGGTAALGCLVKDYFPEPVTVSWNSGALTSGVHTFPAVLQSSGLYSLSSVVTVPSSSLGTQTYICNVNHKPSNTKVDKKVEPKSCDKTH

SEQ ID NO: 803 - protein, 10 aa, Artificial
  YS #3 CDR-H1
GFYISSSSIH

SEQ ID NO: 804 - protein, 17 aa, Artificial
  YS #3 CDR-H2
SISPYSGYTYYADSVKG

SEQ ID NO: 805 - protein, 17 aa, Artificial
  YS #3 CDR-H3
SYYSSSYSSYYSSAMDY

SEQ ID NO: 806 - protein, 233 aa, Artificial; identical to SEQ ID NO: 701
  YS #3 HC

SEQ ID NO: 807 - protein, 10 aa, Artificial
  YS #4 CDR-H1
GFSISSSSIH

SEQ ID NO: 808 - protein, 17 aa, Artificial
  YS #4 CDR-H2
SISPSSGSTYYADSVKG

SEQ ID NO: 809 - protein, 17 aa, Artificial
  YS #4 CDR-H3
SYYSSSYSSYYSSAMDY

SEQ ID NO: 810 - protein, 233 aa, Artificial; identical to SEQ ID NO: 703
  YS #4 HC

SEQ ID NO: 811 - protein, 5 aa, Artificial
  YS #5 CDR-H1
GFIIH

SEQ ID NO: 812 - protein, 17 aa, Artificial
  YS #5 CDR-H2
SISPSSGSTYYADSVKG

SEQ ID NO: 813 - protein, 17 aa, Artificial
  YS #5 CDR-H3
SYYSSSYYSYYSSAMDY

SEQ ID NO: 814 - protein, 228 aa, Artificial
  YS #5 HC
EVQLVESGGGLVQPGGSLRLSCAASGFIIHWVRQAPGKGLEWVASISPSSGSTYYADSVKGRFTISADTSKNTAYLQMNSLRAEDTAVYYCSRSYYSSSYYSYYSSAMDYWGQGTLVTVSSASTKGPSVFPLAPSSKSTSGGTAALGCLVKDYFPEPVTVSWNSGALTSGVHTFPAVLQSSGLYSLSSVVTVPSSSLGTQTYICNVNHKPSNTKVDKKVEPKSCDKTH

SEQ ID NO: 815 - protein, 10 aa, Artificial
  YS #6 CDR-H1
GFSISSSSIH

SEQ ID NO: 816 - protein, 17 aa, Artificial
  YS #6 CDR-H2
SISPYSGYTYYADSVKG

SEQ ID NO: 817 - protein, 17 aa, Artificial
  YS #6 CDR-H3
SYYSSSYYSYYSSAMDY

SEQ ID NO: 818 - protein, 233 aa, Artificial; identical to SEQ ID NO: 706
  YS #6 HC

SEQ ID NO: 819 - protein, 10 aa, Artificial
  YS #7 CDR-H1
GFYISSSSIH

SEQ ID NO: 820 - protein, 17 aa, Artificial
  YS #7 CDR-H2
SISPYSGSTYYADSVKG

SEQ ID NO: 821 - protein, 17 aa, Artificial
  YS #7 CDR-H3
SYYSSSYYSYYSSAMDY

SEQ ID NO: 822 - protein, 233 aa, Artificial; identical to SEQ ID NO: 708
  YS #7 HC

SEQ ID NO: 823 - protein, 10 aa, Artificial
  YS #8 CDR-H1
GFSISSSSIH

SEQ ID NO: 824 - protein, 17 aa, Artificial
  YS #8 CDR-H2
SISPYSGSTYYADSVKG

SEQ ID NO: 825 - protein, 17 aa, Artificial
  YS #8 CDR-H3
SYYSSSYYYYYSSAMDY

SEQ ID NO: 826 - protein, 233 aa, Artificial; identical to SEQ ID NO: 710
  YS #8 HC

SEQ ID NO: 827 - protein, 10 aa, Artificial
  YS #9 CDR-H1
GFSISSSSIH

SEQ ID NO: 828 - protein, 17 aa, Artificial
  YS #9 CDR-H2
SISPSYGYTSYADSVKG

SEQ ID NO: 829 - protein, 17 aa, Artificial
  YS #9 CDR-H3
SYYSSSYSSYYSSAMDY

SEQ ID NO: 830 - protein, 233 aa, Artificial; identical to SEQ ID NO: 713
  YS #9 HC

SEQ ID NO: 831 - protein, 10 aa, Artificial
  YS #10 CDR-H1
GFSISSSSIH

SEQ ID NO: 832 - protein, 17 aa, Artificial
  YS #10 CDR-H2
SISPYSGSTYYADSVKG

SEQ ID NO: 833 - protein, 17 aa, Artificial
  YS #10 CDR-H3
SYYSSSYSSYYSSAMDY

SEQ ID NO: 834 - protein, 233 aa, Artificial; identical to SEQ ID NO: 714
  YS #10 HC

SEQ ID NO: 835 - protein, 10 aa, Artificial
  YS #11 CDR-H1
GFSISSYSIH

SEQ ID NO: 836 - protein, 17 aa, Artificial
  YS #11 CDR-H2
SISPYSGSTYYADSVKG

SEQ ID NO: 837 - protein, 17 aa, Artificial
  YS #11 CDR-H3
SSYSSSYSSYYSSAMDY

SEQ ID NO: 838 - protein, 233 aa, Artificial
  YS #11 HC
EVQLVESGGGLVQPGGSLRLSCAASGFSISSSSIHWVRQAPGKGLEWVASISPYSGSTYYADSVKGRFTISADTSKNTAYLQMNSLRAEDTAVYYCSRSSYSSSYSSYYSSAMDYWGQGTLVTVSSASTKGPSVFPLAPSSKSTSGGTAALGCLVKDYFPEPVTVSWNSGALTSGVHTFPAVLQSSGLYSLSSVVTVPSSSLGTQTYICNVNHKPSNTKVDKKVEPKSCDKTH

SEQ ID NO: 839 - protein, 5 aa, Artificial
  YS #12 CDR-H1
GFIIH

SEQ ID NO: 840 - protein, 17 aa, Artificial
  YS #12 CDR-H2
SISPSSGSTSYADSVKG

SEQ ID NO: 841 - protein, 17 aa, Artificial
  YS #12 CDR-H3
SYSYSSYSYSYSYAMDY

SEQ ID NO: 842 - protein, 228 aa, Artificial
  YS #12 HC
EVQLVESGGGLVQPGGSLRLSCAASGFIIHWVRQAPGKGLEWVASISPSSGSTSYADSVKGRFTISADTSKNTAYLQMNSLRAEDTAVYYCSRSYSYSSYSYSYSYAMDYWGQGTLVTVSSASTKGPSVFPLAPSSKSTSGGTAALGCLVKDYFPEPVTVSWNSGALTSGVHTFPAVLQSSGLYSLSSVVTVPSSSLGTQTYICNVNHKPSNTKVDKKVEPKSCDKTH

SEQ ID NO: 843 - protein, 10 aa, Artificial
  YS #13 CDR-H1
GFSISSSSIH

SEQ ID NO: 844 - protein, 17 aa, Artificial
  YS #13 CDR-H2
YISPYSGSTSYADSVKG

SEQ ID NO: 845 - protein, 19 aa, Artificial
  YS #13 CDR-H3
YYYSYYSSSYSSYYYAMDY

SEQ ID NO: 846 - protein, 235 aa, Artificial
  YS #13 HC
EVQLVESGGGLVQPGGSLRLSCAASGFSISSSSIHWVRQAPGKGLEWVAYISPYSGSTSYADSVKGRFTISADTSKNTAYLQMNSLRAEDTAVYYCSRYYYSYYSSSYSSYYYAMDYWGQGTLVTVSSASTKGPSVFPLAPSSKSTSGGTAALGCLVKDYFPEPVTVSWNSGALTSGVHTFPAVLQSSGLYSLSSVVTVPSSSLGTQTYICNVNHKPSNTKVDKKVEPKSCDKTH

SEQ ID NO: 847 - protein, 10 aa, Artificial
  YS #14 CDR-H1
GFSIYSSSIH

SEQ ID NO: 848 - protein, 17 aa, Artificial
  YS #14 CDR-H2
YISPYSGSTSYADSVKG

SEQ ID NO: 849 - protein, 16 aa, Artificial
  YS #14 CDR-H3
YYSSSYSYSYYYAMDY

SEQ ID NO: 850 - protein, 232 aa, Artificial; identical to SEQ ID NO: 670
  YS #14 HC

SEQ ID NO: 851 - protein, 10 aa, Artificial
  YS #15 CDR-H1
GFSISYSSIH

SEQ ID NO: 852 - protein, 17 aa, Artificial
  YS #15 CDR-H2
YISPYSGSTSYADSVKG

SEQ ID NO: 853 - protein, 19 aa, Artificial
  YS #15 CDR-H3
YSSYSSSSYYSSYYYAMDY

SEQ ID NO: 854 - protein, 235 aa, Artificial
  YS #15 HC
EVQLVESGGGLVQPGGSLRLSCAASGFSISYSSIHWVRQAPGKGLEWVAYISPYSGSTSYADSVKGRFTISADTSKNTAYLQMNSLRAEDTAVYYCSRYSSYSSSSYYSSYYYAMDYWGQGTLVTVSSASTKGPSVFPLAPSSKSTSGGTAALGCLVKDYFPEPVTVSWNSGALTSGVHTFPAVLQSSGLYSLSSVVTVPSSSLGTQTYICNVNHKPSNTKVDKKVEPKSCDKTH

SEQ ID NO: 855 - protein, 10 aa, Artificial
  YS #16 CDR-H1
GFSIYYSSIH

SEQ ID NO: 856 - protein, 17 aa, Artificial
  YS #16 CDR-H2
YISPSSGSTSYADSVKG

SEQ ID NO: 857 - protein, 16 aa, Artificial
  YS #16 CDR-H3
YYSSSSYYSYYYAMDY

SEQ ID NO: 858 - protein, 232 aa, Artificial
  YS #16 HC
EVQLVESGGGLVQPGGSLRLSCAASGFSIYYSSIHWVRQAPGKGLEWVAYISPSSGSTSYADSVKGRFTISADTSKNTAYLQMNSLRAEDTAVYYCSRYYSSSSYYSYYYAMDYWGQGTLVTVSSASTKGPSVFPLAPSSKSTSGGTAALGCLVKDYFPEPVTVSWNSGALTSGVHTFPAVLQSSGLYSLSSVVTVPSSSLGTQTYICNVNHKPSNTKVDKKVEPKSCDKTH

SEQ ID NO: 859 - protein, 10 aa, Artificial
  YS #17 CDR-H1
GFSISSSSIH

SEQ ID NO: 860 - protein, 17 aa, Artificial
  YS #17 CDR-H2
YISPSSGSTSYADSVKG

SEQ ID NO: 861 - protein, 16 aa, Artificial
  YS #17 CDR-H3
YYSSSYYYSYYYAMDY

SEQ ID NO: 862 - protein, 232 aa, Artificial; identical to SEQ ID NO: 20
  YS #17 HC

SEQ ID NO: 863 - protein, 10 aa, Artificial
  YS #18 CDR-H1
GFSIYSSSIH

SEQ ID NO: 864 - protein, 17 aa, Artificial
  YS #18 CDR-H2
YISPSSGSTSYADSVKG

SEQ ID NO: 865 - protein, 16 aa, Artificial
  YS #18 CDR-H3
YYYSYSSYSYYYAMDY

SEQ ID NO: 866 - protein, 232 aa, Artificial; identical to SEQ ID NO: 672
  YS #18 HC

SEQ ID NO: 867 - protein, 10 aa, Artificial
  YS #19 CDR-H1
GFSISYSSIH

SEQ ID NO: 868 - protein, 17 aa, Artificial
  YS #19 CDR-H2
YISPYSGSTSYADSVKG

SEQ ID NO: 869 - protein, 18 aa, Artificial
  YS #19 CDR-H3
YYSSYSYYSSSYYYAMDY

SEQ ID NO: 870 - protein, 234 aa, Artificial; identical to SEQ ID NO: 594
  YS #19 HC

SEQ ID NO: 871 - protein, 10 aa, Artificial
  YS #20 CDR-H1
GFSISYSSIH

SEQ ID NO: 872 - protein, 17 aa, Artificial
  YS #20 CDR-H2
YISPSSGSTSYADSVKG

SEQ ID NO: 873 - protein, 16 aa, Artificial
  YS #20 CDR-H3
YYSSSSYYSYYYAMDY

SEQ ID NO: 874 - protein, 232 aa, Artificial
  YS #20 HC
EVQLVESGGGLVQPGGSLRLSCAASGFSIYSSSIHWVRQAPGKGLEWVAYISPSSGSTSYADSVKGRFTISADTSKNTAYLQMNSLRAEDTAVYYCSRYYSSSSYYSYYYAMDYWGQGTLVTVSSASTKGPSVFPLAPSSKSTSGGTAALGCLVKDYFPEPVTVSWNSGALTSGVHTFPAVLQSSGLYSLSSVVTVPSSSLGTQTYICNVNHKPSNTKVDKKVEPKSCDKTH

SEQ ID NO: 875 - protein, 10 aa, Artificial
  YS #21 CDR-H1
GFSIYSSSIH

SEQ ID NO: 876 - protein, 17 aa, Artificial
  YS #21 CDR-H2
SISPYSGSTSYADSVKG

SEQ ID NO: 877 - protein, 11 aa, Artificial
  YS #21 CDR-H3
STYAFFSAMDY

SEQ ID NO: 878 - protein, 227 aa, Artificial
  YS #21 HC
EVQLVESGGGLVQPGGSLRLSCAASGFSIYSSSIHWVRQAPGKGLEWVASISPYSGSTSYADSVKGRFTISADTSKNTAYLQMNSLRAEDTAVYYCSRSTYAFFSAMDYWGQGTLVTVSSASTKGPSVFPLAPSSKSTSGGTAALGCLVKDYFPEPVTVSWNSGALTSGVHTFPAVLQSSGLYSLSSVVTVPSSSLGTQTYICNVNHKPSNTKVDKKVEPKSCDKTH

SEQ ID NO: 879 - protein, 10 aa, Artificial
  YS #22 CDR-H1
GFSIYSYSIH

SEQ ID NO: 880 - protein, 17 aa, Artificial
  YS #22 CDR-H2
SISPYSGSTSYADSVKG

SEQ ID NO: 881 - protein, 11 aa, Artificial
  YS #22 CDR-H3
SSYAFFSAMDY

SEQ ID NO: 882 - protein, 227 aa, Artificial
  YS #22 HC
EVQLVESGGGLVQPGGSLRLSCAASGFSIYSYSIHWVRQAPGKGLEWVASISPYSGSTSYADSVKGRFTISADTSKNTAYLQMNSLRAEDTAVYYCSRSSYAFFSAMDYWGQGTLVTVSSASTKGPSVFPLAPSSKSTSGGTAALGCLVKDYFPEPVTVSWNSGALTSGVHTFPAVLQSSGLYSLSSVVTVPSSSLGTQTYICNVNHKPSNTKVDKKVEPKSCDKTH

SEQ ID NO: 883 - protein, 10 aa, Artificial
  YS #23 CDR-H1
GFSISSYSIH

SEQ ID NO: 884 - protein, 17 aa, Artificial
  YS #23 CDR-H2
YISPYSGSTSYADSVKG

SEQ ID NO: 885 - protein, 11 aa, Artificial
  YS #23 CDR-H3
SSYAFFGAMDY

SEQ ID NO: 886 - protein, 227 aa, Artificial
  YS #23 HC
EVQLVESGGGLVQPGGSLRLSCAASGFSISSYSIHWVRQAPGKGLEWVAYISPYSGSTSYADSVKGRFTISADTSKNTAYLQMNSLRAEDTAVYYCSRSSYAFFGAMDYWGQGTLVTVSSASTKGPSVFPLAPSSKSTSGGTAALGCLVKDYFPEPVTVSWNSGALTSGVHTFPAVLQSSGLYSLSSVVTVPSSSLGTQTYICNVNHKPSNTKVDKKVEPKSCDKTH

SEQ ID NO: 887 - protein, 10 aa, Artificial
  YS #24 CDR-H1
GFYISSYSIH

SEQ ID NO: 888 - protein, 17 aa, Artificial
  YS #24 CDR-H2
SISPYSGSTSYADSVKG

SEQ ID NO: 889 - protein, 11 aa, Artificial
  YS #24 CDR-H3
TSYAFFGAMDY

SEQ ID NO: 890 - protein, 227 aa, Artificial
  YS #24 HC
EVQLVESGGGLVQPGGSLRLSCAASGFYISSYSIHWVRQAPGKGLEWVASISPYSGSTSYADSVKGRFTISADTSKNTAYLQMNSLRAEDTAVYYCSRTSYAFFGAMDYWGQGTLVTVSSASTKGPSVFPLAPSSKSTSGGTAALGCLVKDYFPEPVTVSWNSGALTSGVHTFPAVLQSSGLYSLSSVVTVPSSSLGTQTYICNVNHKPSNTKVDKKVEPKSCDKTH

SEQ ID NO: 891 - protein, 10 aa, Artificial
  YS #25 CDR-H1
GFSIYSYSIH

SEQ ID NO: 892 - protein, 17 aa, Artificial
  YS #25 CDR-H2
SISPYSGSTSYADSVKG

SEQ ID NO: 893 - protein, 11 aa, Artificial
  YS #25 CDR-H3
SSFAFFSAMDY

SEQ ID NO: 894 - protein, 227 aa, Artificial
  YS #25 HC
EVQLVESGGGLVQPGGSLRLSCAASGFSIYSYSIHWVRQAPGKGLEWVASISPYSGSTSYADSVKGRFTISADTSKNTAYLQMNSLRAEDTAVYYCSRSSFAFFSAMDYWGQGTLVTVSSASTKGPSVFPLAPSSKSTSGGTAALGCLVKDYFPEPVTVSWNSGALTSGVHTFPAVLQSSGLYSLSSVVTVPSSSLGTQTYICNVNHKPSNTKVDKKVEPKSCDKTH

SEQ ID NO: 895 - protein, 10 aa, Artificial
  YS #26 CDR-H1
GFSIYSYSIH

SEQ ID NO: 896 - protein, 17 aa, Artificial
  YS #26 CDR-H2
SISPSYGSTYYADSVKG

SEQ ID NO: 897 - protein, 11 aa, Artificial
  YS #26 CDR-H3
SSFAFFGAMDY

SEQ ID NO: 898 - protein, 227 aa, Artificial
  YS #26 HC
EVQLVESGGGLVQPGGSLRLSCAASGFSIYSYSIHWVRQAPGKGLEWVASISPSYGSTYYADSVKGRFTISADTSKNTAYLQMNSLRAEDTAVYYCSRSSFAFFGAMDYWGQGTLVTVSSASTKGPSVFPLAPSSKSTSGGTAALGCLVKDYFPEPVTVSWNSGALTSGVHTFPAVLQSSGLYSLSSVVTVPSSSLGTQTYICNVNHKPSNTKVDKKVEPKSCDKTH

SEQ ID NO: 899 - protein, 10 aa, Artificial
  YS #27 CDR-H1
GFSIYSSSIH

SEQ ID NO: 900 - protein, 17 aa, Artificial
  YS #27 CDR-H2
SISPYSGSTSYADSVKG

SEQ ID NO: 901 - protein, 11 aa, Artificial
  YS #27 CDR-H3
STFAFYSAMDY

SEQ ID NO: 902 - protein, 227 aa, Artificial
  YS #27 HC
EVQLVESGGGLVQPGGSLRLSCAASGFSIYSSSIHWVRQAPGKGLEWVASISPYSGSTSYADSVKGRFTISADTSKNTAYLQMNSLRAEDTAVYYCSRSTFAFYSAMDYWGQGTLVTVSSASTKGPSVFPLAPSSKSTSGGTAALGCLVKDYFPEPVTVSWNSGALTSGVHTFPAVLQSSGLYSLSSVVTVPSSSLGTQTYICNVNHKPSNTKVDKKVEPKSCDKTH

SEQ ID NO: 903 - protein, 10 aa, Artificial
  YS #28 CDR-H1
GFSISYSSIH

SEQ ID NO: 904 - protein, 17 aa, Artificial
  YS #28 CDR-H2
SISPYSGYTSYADSVKG

SEQ ID NO: 905 - protein, 23 aa, Artificial
  YS #28 CDR-H3
SSYYYSSSYYYYYSSYSSSAMDY

SEQ ID NO: 906 - protein, 239 aa, Artificial
  YS #28 HC
EVQLVESGGGLVQPGGSLRLSCAASGFSISYSSIHWVRQAPGKGLEWVASISPYSGYTSYADSVKGRFTISADTSKNTAYLQMNSLRAEDTAVYYCSRSSYYYSSSYYYYYSSYSSSAMDYWGQGTLVTVSSASTKGPSVFPLAPSSKSTSGGTAALGCLVKDYFPEPVTVSWNSGALTSGVHTFPAVLQSSGLYSLSSVVTVPSSSLGTQTYICNVNHKPSNTKVDKKVEPKSCDKTH

SEQ ID NO: 907 - protein, 10 aa, Artificial
  YS #29 CDR-H1
GFSISYSSIH

SEQ ID NO: 908 - protein, 17 aa, Artificial
  YS #29 CDR-H2
SISPYSGYTSYADSVKG

SEQ ID NO: 909 - protein, 23 aa, Artificial
  YS #29 CDR-H3
SSYYYPPSYYYYNSSYSSSAMDY

SEQ ID NO: 910 - protein, 239 aa, Artificial
  YS #29 HC
EVQLVESGGGLVQPGGSLRLSCAASGFSISYSSIHWVRQAPGKGLEWVASISPYSGYTSYADSVKGRFTISADTSKNTAYLQMNSLRAEDTAVYYCSRSSYYYPPSYYYYNSSYSSSAMDYWGQGTLVTVSSASTKGPSVFPLAPSSKSTSGGTAALGCLVKDYFPEPVTVSWNSGALTSGVHTFPAVLQSSGLYSLSSVVTVPSSSLGTQTYICNVNHKPSNTKVDKKVEPKSCDKTH

SEQ ID NO: 911 - protein, 10 aa, Artificial
  YS #30 CDR-H1
GFSIYYSSIH

SEQ ID NO: 912 - protein, 17 aa, Artificial
  YS #30 CDR-H2
SIYPYSGSTSYADSVKG

SEQ ID NO: 913 - protein, 24 aa, Artificial
  YS #30 CDR-H3
YYSYYSSYYYSSSSSSSYSSAMDY

SEQ ID NO: 914 - protein, 240 aa, Artificial
  YS #30 HC
EVQLVESGGGLVQPGGSLRLSCAASGFSIYYSSIHWVRQAPGKGLEWVASIYPYSGSTSYADSVKGRFTISADTSKNTAYLQMNSLRAEDTAVYYCSRYYSYYSSYYYSSSSSSSYSSAMDYWGQGTLVTVSSASTKGPSVFPLAPSSKSTSGGTAALGCLVKDYFPEPVTVSWNSGALTSGVHTFPAVLQSSGLYSLSSVVTVPSSSLGTQTYICNVNHKPSNTKVDKKVEPKSCDKTH

SEQ ID NO: 915 - protein, 7 aa, Artificial
  CDRH3
  MISC_FEATURE (1)..(1): Xaa is Tyr or Phe
  MISC_FEATURE (2)..(2): Xaa is Val or Ala
  MISC_FEATURE (4)..(4): Xaa is Phe or Tyr
  MISC_FEATURE (5)..(5): Xaa is Leu or Ala
  MISC_FEATURE (6)..(6): Xaa is Pro or Ala
  MISC_FEATURE (7)..(7): Xaa is Tyr or Phe
XXFXXXX

SEQ ID NO: 916 - protein, 6 aa, Artificial
  CDRL1
  MISC_FEATURE (1)..(2): Xaa is any amino acid
  MISC_FEATURE (3)..(4): Xaa is Arg
  MISC_FEATURE (5)..(5): Xaa is Ser or Ala
XXXXXL

SEQ ID NO: 917 - protein, 3 aa, Artificial
  CDRL2
  MISC_FEATURE (1)..(1): Xaa is Ser or Ala or Gly
  MISC_FEATURE (2)..(3): Xaa is any amino acid
XXX

SEQ ID NO: 918 - protein, 6 aa, Artificial
  CDRL3
  MISC_FEATURE (2)..(3): Xaa is any amino acid
  MISC_FEATURE (4)..(4): Xaa is Ser or Ala
SXXXPL

SEQ ID NO: 919 - protein, 6 aa, Artificial
  CDRL2
  MISC_FEATURE (1)..(1): Xaa is Ser, Ala or Gly
  MISC_FEATURE (4)..(4): Xaa is any amino acid
  MISC_FEATURE (6)..(6): Xaa is any amino acid
XASXLX

SEQ ID NO: 920 - DNA, 27 bp, Artificial
  Terminator Sequence
gctcggttgccgccgggcgttttttat

SEQ ID NO: 921 - protein, 6 aa, Artificial
  B29 CDRH1
TGSGIH

SEQ ID NO: 922 - protein, 18 aa, Artificial
  B29 CDRH2
GWIYPYSGNTYYADSVKG

SEQ ID NO: 923 - protein, 12 aa, Artificial
  B29 CDRH3
ALWAFVPAAMDY

SEQ ID NO: 924 - protein, 228 aa, Artificial
  B29 heavy chain
EVQLVESGGGLVQPGGSLRLSCAASGFTITGSGIHWVRQAPGKGLEWVGAIYPYSGYTNYADSVKGRFTISADTSKNTAYLQMNSLRAEDTAVYYCARALWAFVPAAMDYWGQGTLVTVSSASTKGPSVFPLAPSSKSTSGGTAALGCLVKDYFPEPVTVSWNSGALTSGVHTFPAVLQSSGLYSLSSVVTVPSSSLGTQTYICNVNHKPSNTKVDKKVEPKSCDKTH

SEQ ID NO: 925 - protein, 6 aa, Artificial
  C3 CDRH1
TGSSIH

SEQ ID NO: 926 - protein, 18 aa, Artificial
  C3 CDRH2
ARISPAGGYTDYADSVKG

SEQ ID NO: 927 - protein, 228 aa, Artificial
  C3 heavy chain
EVQLVESGGGLVQPGGSLRLSCAASGFTITGSSIHWVRQAPGKGLEWVARISPAGGYTDYADSVKGRFTISADTSKNTAYLQMNSLRAEDTAVYYCARYFRWYMPAAMDYWGQGTLVTVSSASTKGPSVFPLAPSSKSTSGGTAALGCLVKDYFPEPVTVSWNSGALTSGVHTFPAVLQSSGLYSLSSVVTVPSSSLGTQTYICNVNHKPSNTKVDKKVEPKSCDKTH

SEQ ID NO: 928 - protein, 12 aa, Artificial
  C3 CDRH3
YFRWYMPAAMDY

What is claimed:

1. An antibody capable of binding to mouse VEGF and human VEGF with Kd values within 10 fold of the other and is capable of inhibiting the binding of VEGF to a VEGF receptor.

2. The antibody according to claim 1, wherein the antibody is capable of binding to a human VEGF G88A mutant with a Kd value that is within 10 fold of the Kd value of unmutated human VEGF.

3. The antibody according to claim 1, wherein the antibody is capable of binding a human VEGF G88A mutant with a Kd value that is 10 nM or less.

4. The antibody according to claim 1, wherein the antibody contacts no more than 80% of the surface area of G88 of human VEGF.

5. The antibody according to claim 1, wherein the receptor is a VEGF receptor 2 (KDR).

6. The antibody according to claim 1, wherein the receptor is a VEGF receptor 1 (Flt-1).

7. The antibody according to claim 1, the antibody is capable of inhibiting the binding of VEGF to VEGF receptor 1 and VEGF receptor 2.

8. The antibody according to claim 1, wherein the antibody binds to mouse and human VEGF with Kd values of 10 nM or less.

9. The antibody according to claim 1, wherein the antibody binds to mouse and human VEGF with Kd values of 2 nM or less.

10. The antibody according to claim 1, wherein the antibody binds to human VEGF with an on-rate (kₒₙ) of 1.0 or more (10 M⁻¹ S⁻¹).

11. The antibody according to claim 1, wherein the antibody binds to the 20 s helix of VEGF.

12. The antibody according to claim 1, wherein the antibody binds to the 80 s loop of VEGF.

13. The antibody according to claim 1, wherein the antibody binds to the 20 s helix and 80 s loop of VEGF.

14. The antibody according to claim 1, wherein the antibody has a functional epitope comprising residue residue F17 of human VEGF.

15. The antibody according to claim 1 wherein the antibody has a functional epitope comprising residues F17 and I83 of human VEGF.

16. The antibody according to claim 1, wherein the antibody has a functional epitope comprising residues F17, I83 and Q89 of human VEGF.

17. The antibody according to claim 1 wherein the antibody has a functional epitope comprising residues F17 and M18 of human VEGF.

18. The antibody according to claim 1, wherein the antibody has a functional epitope comprising residues F17, M18 and I89 of human VEGF.

19. The antibody according to claim 1, wherein the antibody has a functional epitope comprising residues F17, Y21 and Y25 of human VEGF.

20. The antibody according to claim 1, wherein the antibody has a functional epitope comprising residues F17, Y21, Q22, Y25, D63 and I83 of human VEGF.

21. The antibody according to claim 1, wherein the antibody has a functional epitope comprising residues F17, Y21, Y25 and Q89 of human VEGF.

22. The antibody according to claim 1, wherein the antibody has a functional epitope comprising residues F17, M18, D19, Y21, Y25, Q89, I91, K101, E103 and C104 of human VEGF.

23. The antibody according to claim 1 wherein the antibody has a functional epitope comprising residues F17, Y21, Q22, Y25, D63, I83 and Q89 of human VEGF.

24. The antibody according to claim 1, wherein the antibody has a functional epitope comprising a combination of any of the residues selected from the group consisting of F17, M18, Y21, Q22, Y25, K48, D63, L66, I83, H86, Q89, I91, C104 and P106 of human VEGF.

25. The antibody according to claim 1, wherein the antibody has a functional epitope comprising the residues F17, M18, Y21, Q22, Y25, K48, D63, L66, I83, H86, Q89, I91, C104 and P106 of human VEGF.

26. The antibody according to claim 1, wherein the antibody comprises a CDR-H3 comprising the contiguous amino acid sequence X₁X₂FX₄X₅X₆X₇, wherein
X₁ is Y or F;
X₂ is V or A;
X₄ is F or Y;
X₅ is L or A;
X₆ is P or A; and
X₇ is Y or F.

27. The antibody according to claim 26, wherein the CDR-H2 comprises a contiguous amino acid sequence GX₂TPX₅G, wherein
X₂ is a I or V or other hydrophobic amino acid; and
X₅ is any amino acid residue.

28. The antibody according to claim 27, wherein the CDR-H1 comprises a contigous amino acid sequence X₁X₂X_{3z},IH, wherein
X₁ is any amino acid residue;
X₂ is Y or F; and
X₃ is W or L.

29. The antibody according to claim 1, wherein the antibody comprises the CDR-H3 sequence of any one of the antibodies of FIGS. 7, 24-29 and 34-43.

30. The antibody according to claim 1, wherein the antibody comprises a variable region comprising a sequence of any one of the antibodies of FIGS. 7, 24-29 and 34-43.

31. An antibody comprising the CDR-H1 sequence, CDR-H2 sequence and CDR-H3 sequence of any one of the antibodies of FIGS. 7, 24-29 and 34-43.

32. An antibody comprising a variable region comprising a sequence described in any one of the antibodies of FIGS. 7, 24-29 and 34-43.

33. The antibody of any claim 1, further comprising the framework regions of the G6 antibody.

34. An antibody comprising:
(a) a CDR-L1 comprising the contiguous amino acid sequence X₁X₂X₃X₄X₅L, wherein:
X₁ and X₂ are any amino acid;
Either X₃ or X₄ or both X₃ and X₄ are R;
X₅ is S or A.
(b) a CDR-L2 comprising a contiguous amino acid sequence X₁X₂X₃, wherein
X₁ is S or A or G; and
X₂ and X₃ is any amino acid residue.
(c) a CDR-L3 comprising a contigous amino acid sequence SX₁X₂X₃PL, wherein X₁ and X₂ are any amino acid residue; and
X₃ is S or A.

35. The antibody according to claim 34, wherein the antibody comprises the framework regions of the B20-4.1 antibody.

36. The antibody according to claim 26, wherein the antibody binds human VEGF and mouuse VEGF with Kd values within 10 fold of each other.

37. The antibody according to claim 1, wherein the antibody is a monoclonal antibody.

38. The antibody according to claim 1, wherein the antibody is a bispecific antibody.

39. The antibody according to claim 1, wherein the antibody is a synthetic antibody.

40. A synthetic antibody capable of binding hVEGF with a Kd value of no more than about 2 nM.

41. The antibody of claim 40, wherein the Kd value is no more than about 1 nM.

42. The antibody of claim 41, wherein the Kd value is no more than about 500 pM.

43. The antibody of claim 42, which is capable of binding to a VEGF from a non-human mammal species with a Kd value that is within 10 fold of the Kd value for hVEGF binding.

44. The antibody of claim 43, wherein the VEGF from a non-human mammal is murine VEGF.

45. The antibody of claim 40 comprising at least one variant CDR having a variant amino acid in at least one solvent accessible and highly diverse amino acid position, wherein the variant amino acid is encoded by a nonrandom codon set, and wherein at least 70% of the amino acids encoded by the nonrandom set are target amino acids for that position in known antibody variable domains.

46. The antibody of claim 45 having a heavy chain variable domain which comprises at least 1, 2 or 3 variant CDRs selected from the group consisting of CDR H1, H2 and H3.

47. The antibody of claim 46, wherein the heavy chain variable domain comprises a variant CDR H3.

48. The antibody of claim 46, comprising following amino acid sequence as its heavy chain variable domain (VH) and first heavy chain constant domain (CH1):
EVQLVESGGGLVQPGGSLRLSCAASGFTISDYWIHWVRQAPGKGLEWVAG
ITPAGGYTYYADSVKGRFTISADTSKNTAYLQMNSLRAEDTAVYYCARFV
FFLPYAMDYWGQGTLVTVSSASTKGPSVFPLAPSSKSTSGGTAALGCLVK
DYFPEPVTVSWNSGALTSGVHTFPAVLQSSGLYSLSSVVTVPSSSLGTQT
YICNVNHKPSNTKVDKKVEPKSCDKTH

49. The antibody of claim 48, further comprising following amino acid sequence as its light chain:
DIQMTQSPSSLSASVGDRVTITCRASQDVSTAVAWYQQKPGKAPKLLIYS
ASFLYSGVPSRFSGSGSGTDFTLTISSLQPEDFATYYCQQSYTTPPTFGQ
GTKVEIKRTVAAPSVFIFPPSDEQLKSGTASVVCLLNNFYPREAKVQWKV
DNALQSGNSQESVTEQDSKDSTYSLSSTLTLSKADYEKHKVYACEVTHQG
LSSPVTKSFNRGEC

50. The antibody of claim 45, having a light chain variable domain which comprises at least 1, 2 or 3 variant CDRs selected from the group consisting of CDR L1, L2 and L3.

51. The antibody of claim 48, further comprising following amino acid sequence as its light chain:
DIQMTQSPSSLSASVGDRVTITCRASQDVSTAVAWYQQKPGKAPKLLIYS
ASFLYSGVPSRFSGSGSGTDFTLTISSLQPEDFATYYCKQGYANPWTFGQ
GTKVEIKRTVAAPSVFIFPPSDEQLKSGTASVVCLLNNFYPREAKVQWKV
DNALQSGNSQESVTEQDSKDSTYSLSSTLTLSKADYEKHKVYACEVTHQG
LSSPVTKSFNRGEC

52. A method of selecting a hVEGF antibody from a library of synthetic antibodies comprising:
a) generating the library of synthetic antibodies having a designed diversity in at least one of the CDRs;
b) contacting the library with hVEGF to form binders;
c) separating the binders from the nonbinders, and eluting the binders from the target hVEGF and incubating the binders in a solution with decreasing amounts of the target hVEGF in a concentration from about 0.1 nM to 1000 nM; and
d) selecting the binders that can bind to the lowest concentration of the target VEGF and that have an affinity of about 500 pM to 2 nM.

53. Isolated nucleic acid encoding the antibody of claim 1.

54. A vector comprising the nucleic acid of claim 53.

55. A host cell transformed with the vector of claim 55.

56. A process of producing an antibody comprising culturing the host cell of claim 55 so that the nucleic acid is expressed.

57. The process of claim 56 further comprising recovering the antibody from the host cell culture.

58. The process of claim 57 wherein the antibody is recovered from the host cell culture medium.

59. A method of using the antibody of claim 1 for treating a disorder associated with pathological angiogenesis in a mammal in need of treatment thereof comprising the step of administering said antibody to the mammal.

60. The method of claim 59, wherein the disorder is cancer.

61. The method of claim 60, wherein the cancer is from the group consisting of breast cancer, colorectal cancer, non-small cell lung cancer, non-Hodgkins lymphoma (NHL), renal cancer, prostate cancer, liver cancer, head and neck cancer, melanoma, ovarian cancer, mesothelioma, and multiple myeloma.

62. The method of claim 61, wherein the treatment further comprises the step of administering a second therapeutic agent simultaneously or sequentially with the antibody.

63. The method of claim 62, wherein the second therapeutic agent is an agent selected from the group consisting of an anti-angiogenic agent, an anti-neoplastic composition, a chemotherapeutic agent and a cytotoxic agent.

64. The method of claim 63, wherein the anti-angiogenic agent is an anti-hVEGF antibody capable of binding to the same VEGF epitope as the antibody A4.6.1.

65. A method of treating a mammal suffering from or at risk of developing an inflammatory or immune disorder comprising the step of treating the mammal with a Fab antibody of claim 1.

66. The method according to claim 65, wherein the inflammatory or immune disorder is rheumatoid arthritis.

67. The method according to claim 65, wherein the Fab antibody is a G6 series antibody.

68. The method according to claim 65, wherein the Fab antibody is a B20 series antibody.
